(19) United States
(12) Patent Application Publication
(10) Pub. No.: US 2019/0330311 A1
(43) Pub. Date: Oct. 31, 2019

(54) CHIMERA PROTEIN COMPRISING FVIII AND VWF FACTORS, AND USE THEREOF

(71) Applicant: MOGAM INSTITUTE FOR BIOMEDICAL RESEARCH, Yongin-si, Gyeonggi-do (KR)

(72) Inventors: Injae OH, Yongin-si (KR); Seung-Hoon LEE, Yongin-si (KR); Eui-Cheol JO, Yongin-si (KR); Mee Sook OH, Yongin-si (KR); Jae Hwan RYU, Yongin-si (KR); Yong Jae KIM, Yongin-si (KR); So Ra KIM, Yongin-si (KR); Jin-hyun PARK, Yongin-si (KR)

(73) Assignee: Mogam Institute for Biomedical Research, Yongin-si, Gyeonggi-do (KR)

(21) Appl. No.: 16/312,589

(22) PCT Filed: Jun. 23, 2017
(86) PCT No.: PCT/KR2017/006655

§ 371 Date: Dec. 21, 2018

Related U.S. Application Data
(60) Provisional application No. 62/354,255, filed on Jun. 24, 2016.

(51) Int. Cl. C07K 14/755; C12N 15/62; C12N 9/64; A61P 7/00

(52) U.S. Cl. CPC C07K 14/755; C12N 15/62; A61K 38/00; A61P 7/00; C12N 9/64

(57) ABSTRACT

A chimera protein according to the present application has a significantly increased in vivo half-life when administered because of a vWF domain coupled to FVIII, such that when used as a hemophilia A therapeutic agent, convenience for patients can be increased and medical expenses can be reduced.

### TECHNICAL FIELD

[0001] The present invention relates to a recombinant Factor VIII used in the treatment of hemophilia.

### BACKGROUND ART

[0002] Hemophilia is a disease in which bleeding develops consecutively since hemostasis is not achieved due to the lack of coagulation factors. The coagulation factors in the blood are composed of I to XIII, and, among them, the factors related to hemophilia are VIII, IX and XI. Hemophilia is caused by the genetic defect of the above factor. Depending on the type of a deficient coagulation factor, hemophilia can be divided into hemophilia A in which Factor VIII is deficient, hemophilia B in which Factor IX is deficient, and hemophilia C in which Factor XI is deficient. And the hemophilia A accounts for about 80 to 85% of the hemophilia.

[0003] The drugs for administration vary depending on the type of hemophilia, and the doses and methods of administration for a type of hemophilia also vary depending on the administration site. However, the goal of hemophilia therapy is hemostasis, and treatment is conducted in two aspects, prophylaxis and on demand treatment, using the enzyme replacement therapy (ERT). Current therapies are showing the tendency of moving toward the prophylactic aspect.

[0004] As for the enzymes used for the ERT, FVIII (hemophilia A) and FIX (hemophilia B), which were extracted from whole blood and plasma and concentrated, were used in the past. However, when hemophilia factors are extracted from whole blood and plasma, some of the blood of people infected with viruses such as AIDS and HBV were used, and adverse events and complications such as viral infection developed owing to insufficient removal of such viruses during the extraction process of the coagulation factors. And thus, recently, various factors produced by recombinant DNA technology have been developed and used. For example, various forms of FVIII are being developed, such as a complete form of FVIII, FVIII in which its B domain is deleted, and FVIII whose half-life has been increased through modification at specific residues.

[0005] When FVIII is used for a prophylactic therapy, the half-life in the blood of FVIII is as short as 12 hours (human), which is inconvenient since it should be administered once every 2-3 days. In addition, since such administration is I.V. administration, reduction in the frequency of administrations is important in terms of patient's convenience. Therefore, long-acting FVIII has recently been developed to increase the half-life of FVIII.

[0006] One of them is a FVIII-Fc fusion protein (FVIII-Fc) in which the Fc domain of an antibody is fused to the C-terminal of FVIII, and this substance uses a strategy of increasing its half-life using FcRn recycling. Several PEGylated FVIIIs have been disclosed, in which PEG (polyethylene glycol) is conjugated around the binding site to LRP (low density lipoprotein receptor related protein), which is known to be responsible for the clearance of FVIII in the body. However, the mean of the half-lives of these long-acting FVIIIs was 18 hours, which increased only by about 1.5-fold as compared to 12 hours of the conventional FVIII, which means that the frequency of administrations of 3-4 times a week in the case of the conventional FVIII decreased to 2-3 times a week. The reason why the half-lives of FVIII-Fc and PEGylated FVIII are not greatly increased is because FVIII is circulating in the blood in a state of strong non-covalent interaction with vWF in the blood. FVIII-Fc and PEGylated FVIII also tend to have non-covalent interaction with vWF present in the blood, and thus have the limitation that they are affected by the half-life of vWF to be converged to the half-life of vWF (12 hours) (Tiede A. Journal of Thrombosis and Haemostasis, 13 (Suppl. 1): S176-S179).

[0007] The therapeutic agents developed so far still have short intervals of administrations (intravenous injection) in terms of a functional aspect, and there is a problem of frequent bleeding due to the loss of effects in the body caused by the half-lives which are not long enough. Therefore, it is necessary to develop a long-acting FVIII with a half-life increased by 3-fold or more in order to reduce the administration frequency to once a week or less.

### DISCLOSURE OF INVENTION

### Technical Problem

[0008] An object of the present invention is to provide an improved FVIII that can be administered with the administration frequency of once a week or less owing to extended residence time in the body.

### Solution to Problem

[0009] In one embodiment, the present invention provides a chimeric protein comprising a human Factor VIII (FVIII) comprising a light chain and a heavy chain, the human FVIII comprising a B domain which is totally deleted in its entire length or partially deleted, and at least one vWF D′D3 domain. The protein according to the present invention has a half-life extended by at least 2-fold.

[0010] In a chimeric protein according to the present invention, the light chain and heavy chain may be expressed as one polypeptide or as two polypeptides.

[0011] According to the present invention, if the light chain and heavy chain are expressed as one polypeptide, the FVIII is linked to the vWF D′D3 domain, and the chimeric protein comprises a linker which has an enzyme cleavage site located therebetween, wherein the N-terminal of the vWF D′D3 domain is located in the N-terminal or C-terminal direction based on the linker, or the FVIII and the vWF D′D3 domain are located in the N-terminal direction and the C-terminal direction or in the C-terminal direction and the N-terminal direction, respectively, based on the linker. In one embodiment, for example, they may be arranged in the order of FVIII-linker-D′D3 or D′D3-linker-FVIII in the N to C direction.

[0012] According to the present invention, if the light chain and heavy chain are expressed as two polypeptides, the N-terminal of the vWF D′D3 domain may be linked to the C-terminal of the B domain comprised in the heavy chain.

[0013] In one embodiment, the partially deleted B domain has at least five amino acid deletions in each of the N-terminal direction and/or C-terminal direction based on the 1648 and 1649 residue positions of SEQ ID NO: 01, the deletion including the residues; or the B domain is partially deleted such that it includes at least 4 glycation sites, or 4 to 6 glycation sites.

[0014] In another embodiment, a B domain which can be included in the partially deleted B domain of the present invention is represented by a sequence of amino acid residues 741 to 902 and 1654 to 1689, or amino acid residues 741 to 936, based on the sequence of SEQ ID NO: 01.

[0015] In another embodiment, the chimeric protein according to the present invention further comprises at least one Fc, wherein the Fc may be linked to the vWF D′D3 domain and/or the FVIII.

[0016] In another embodiment according to the present invention, the chimeric protein according to the present invention may further comprise two or more vWF D′D3 domains and/or two or more Fcs. Herein, among a plurality of vWF D′D3 domains and among a plurality of Fcs, they may be linked to one another by linkers with or without an enzyme cleavage site, and/or they may form complexes by a covalent bond(s) among one another, for example, dimers can be formed if two of them are included. For the enzyme cleavage sites and linkers used herein, reference can be made to those described herein.

[0017] In another embodiment, if a linker comprising an enzyme cleavage site is used in a chimeric protein according to the present invention, the enzyme cleavage site is a sequence which can be cleaved by thrombin, FVIIa, FXa or FXIa; and the other sequence in the linker having the enzyme cleavage site is represented by the amino acid sequence of [G₄S]ₙ, wherein n is 0, or an integer between 1 and 100, in particular, n is 6, 8, 10, 12, 18, 24 or 60.

[0018] In another embodiment, at the enzyme cleavage site included in the linker in the chimeric protein according to the present invention, the amino acid sequence which can be cleaved by the thrombin is DFLAEGGGVR (SEQ ID NO: 36), TTKIKPR (SEQ ID NO: 37), or LVPRGS (SEQ ID NO: 38); the amino acid sequence which can be cleaved by the FVIIa is ASKPQGRIVGG (SEQ ID NO:39); the amino acid sequence which can be cleaved by FXa is IDGR (SEQ ID NO: 40) or IEGR (SEQ ID NO: 41); the sequence which can be cleaved by FXIa can be represented by SKLTRAETVF (SEQ ID NO: 42).

[0019] In another embodiment, the chimeric protein according to the present invention is expressed in the form of first and second polypeptides, wherein the first polypeptide comprises the heavy chain and all or a portion of the B domain of the FVIII, and the second polypeptide comprises the light chain or a portion of the B domain of the FVIII; and the vWF D′D3 domain is located in the N-terminal or C-terminal direction of the first polypeptide, or in the N-terminal or C-terminal direction of the second polypeptide. If the vWF D′D3 domain is linked to the C-terminal of the first polypeptide or the C-terminal of the second polypeptide, it has a structure similar to that in which the vWF D′D3 domain is linked to the N-terminal or the C-terminal of scFVIII, and in these cases, the difference is whether FVIII is a single chain or a two chain.

[0020] In one embodiment, when expressed in the form of first and second polypeptides, the vWF D′D3 domain is located in the C-terminal direction of the first polypeptide.

[0021] The chimeric protein according to the present invention may comprise one or more, specifically, two vWF D′D3 domains, and may form a complex (dimer) between the vWF D′D3 domains.

[0022] Optionally, the chimeric protein according to the present invention further comprises at least one, specifically two Fcs, wherein the Fc can be linked to the vWF D′D3 domain and/or the second polypeptide. A complex (dimer) can be formed between the Fcs.

[0023] In one embodiment, in the chimeric protein according to the present invention, the Fc or the vWF D′D3 domain is linked by a linker with or without an enzyme cleavage site.

[0024] In one embodiment, when a chimeric protein according to the present invention is expressed as one polypeptide, the amino acid sequence represented by SEQ ID NOs: 6, 7, 8, 9, 10, 11, 12, 13, 14, 15, 16, 17, 18, 19, 21, or 25, or an amino acid sequence that is equivalent with respect to its biological function or has at least 90% homology to said amino acid sequence may be included in the present invention.

[0025] In another embodiment, when the chimeric protein according to the present invention is expressed as two polypeptides, the amino acid sequences represented by SEQ ID NOs: 4 and 5 (heavy chain and light chain, respectively), SEQ ID NOs: 23 and 24 (heavy chain and light chain, respectively), SEQ ID NOs: 26 and 27 (heavy chain and light chain, respectively), SEQ ID NOs: 28 and 29 (heavy chain and light chain, respectively), SEQ ID NOs: 30 and 31 (heavy chain and light chain, respectively), SEQ ID NOs: 32, and 33 (heavy chain and light chain, respectively), or SEQ ID NO: 34 and 35 (heavy chain and light chain, respectively), or an amino acid sequence that is equivalent with respect to its biological function or has at least 90% homology to said amino acid sequences may be included in the present invention.

[0026] The chimeric protein according to the present invention may be conjugated to a hydrophilic polymer at one or more amino acid residues of the A and/or B domain fragments of FVIII, and the conjugation position is at least one selected from the group consisting of amino acid residues 754, 781, 782, 788, 789, 825, and 897 based on the sequence of SEQ ID NO: 01 in the B domain, and at least one selected from the group consisting of amino acid residues 491, 495, 498 and 1806 based on the sequence of SEQ ID NO: 01 in the A domain, and the one or more residues at the conjugation position are substituted with cysteine for conjugation with the hydrophilic polymer.

[0027] In one embodiment, the hydrophilic polymer is polyethylene glycol, polyethylene oxide, or dextran.

[0028] In another embodiment, the hydrophilic polymer is polyethylene glycol (PEG), and the PEG for use has an average molecular weight of 20 kDa or more, specifically 40 kDa or 60 kDa.

[0029] In one embodiment, the chimeric protein according to the present invention is modified in the B domain fragment of FVIII, specifically at residue 782.

[0030] In another embodiment, the present invention provides a nucleic acid encoding the chimeric protein described above, a vector comprising the nucleic acid, and a cell containing the vector.

[0031] In still another embodiment, the present invention provides a use of a chimeric protein, a nucleic acid encoding the same, a vector comprising the nucleic acid, and a cell comprising the vector.

[0032] The use of the present invention according to the present application includes a composition for treating hemophilia, a method for treating hemophilia, a blood coagulation composition, a blood coagulation method, or a method for producing a protein according to the present invention.

### Advantageous Effects of Invention

[0033] The chimeric protein in which FVIII and a vWF domain are linked or the chimeric protein in a form of being modified by PEG according to the present invention has a highly increased half-life in the body when administered, thereby reducing the frequency of administrations of conventional agent of 2-4 times a week to less than once a week. And thus, such chimeric protein, as a therapeutic agent for hemophilia A, leads to the increase in convenience of a patient, and the reduction of a treatment cost.

### BRIEF DESCRIPTION OF DRAWINGS

[0034] FIG. 1 is a schematic representation of the mechanism of increase of half-life of the recombinant FVIII with increased half-life according to the present invention. The first strategy is to mask the LRP binding site, which is known to have the greatest effect on the elimination of FVIII in the body, with PEG and D′D3, a domain of vWF. At the same time, the second strategy is covalent binding of D′D3, which is a domain of vWF, to the chimeric protein according to the present invention, to prevent binding of an endogenous vWF in the blood to the chimeric protein.

[0035] FIGS. 2a and 2b are schematic representations of various molecular structures of chimeric proteins expressed as a single chain (single polypeptide) and a double chain (double polypeptide) according to the present invention, respectively.

[0036] FIG. 3 is a schematic representation of a vector encoding a chimeric protein expressed as a single polypeptide according to one embodiment of the present invention.

[0037] FIG. 4 shows the results of the SDS-PAGE analysis after expression and purification of chimeric proteins comprising linkers of various lengths according to one embodiment of the present invention.

[0038] FIG. 5 shows the results of western blot analysis of chimeric proteins comprising linkers of various lengths according to one embodiment of the present invention with antibodies to the heavy chain, light chain and D′D3, respectively, and each antibody used was as follows: heavy chain: Green mountain, GMA-012; light chain: Abcam, 41188; and D′D3: Abcam, 96340.

[0039] FIG. 6 shows the results of the SDS-PAGE analysis after purification of the PEGylated chimeric proteins which were prepared by modification of scFVIII/D′D3-60, -120 and -300 by PEG according to an embodiment of the present invention.

[0040] FIG. 7 shows the results of vWF binding analysis of chimeric FVIII (scFVIII/D′D3-120-TH1) and PEGylated chimeric FVIII (PEG-scFVIII/D′D3-120-TH1) according to one embodiment of the present invention. Advate® was used as a comparative group.

[0041] FIG. 8 shows the results of LRP binding analysis of chimeric FVIII (scFVIII/D′D3-120-TH1) and PEGylated chimeric FVIII (PEG-scFVIII/D′D3-120-TH1) according to one embodiment of the present invention. Advate® was used as a comparative group.

[0042] FIG. 9 shows the results of PK analysis of the PEGylated chimeric FVIII (PEG-scFVIII/D′D3-120) prepared according to one embodiment of the present invention in HA mice. Advate® as a comparative group.

[0043] FIG. 10 shows the results of PK analysis of the PEGylated chimeric FVIII (40 kDa PEG-scFVIII/D′D3-120, 60 kDa PEG-scFVIII/D′D3-120) prepared according to one embodiment of the present invention in HA mice. Advate® was used as a comparative group.

[0044] FIG. 11 shows the PK results of the PEGylated chimeric FVIII (PEG-scFVIII/D′D3-60, PEG-scFVIII/D′D3/Fc-120, Fc) prepared according to one embodiment of the present invention in HA mice. Advate® was used as a comparative group.

[0045] FIG. 12 shows the PK results of the PEGylated chimeric FVIII (PEG-scFVIII/D′D3-300, PEG-scFVIII/D′D3/D′D3-120) prepared according to one embodiment of the present invention in HA mice. Advate® was used as a comparative group.

[0046] FIG. 13 shows the PK results of the PEGylated chimeric FVIII (PEG-scFVIII/D′D3-60, PEG-scFVIII/D′D3-120, PEG-scFVIII/D′D3-300) prepared according to one embodiment of the present invention in HA mice. Advate® was used as a comparative group.

[0047] FIG. 14 shows the PK results of the PEGylated chimeric FVIII (PEG-scFVIII/D′D3-120, PEG-scFVIII/D′D3-120-TH1, PEG-scFVIII/D′D3-120-TH2) prepared according to one embodiment of the present invention in HA mice. Advate® was used as a comparative group.

[0048] FIG. 15 shows the PK results of the PEGylated chimeric FVIII (20 kDa linear PEG-scFVIII/D′D3-120-TH1, 20 kDa branch PEG-scFVIII/D′D3-120-TH1, 40 kDa branch PEG-scFVIII/D′D3-120-TH1) prepared according to one embodiment of the present invention. Advate® was used as a comparative group.

[0049] FIG. 16 shows the results of thrombin generation analysis of the PEGylated chimeric FVIII (PEG-scFVIII/D′D3-120-TH1) prepared according to one embodiment of the present invention.

[0050] FIG. 17 shows the results of the acute efficacy study in the tail clip model regarding the PEGylated chimeric FVIII (PEG-scFVIII/D′D3-120, PEG-scFVIII/D′D3-120-TH1, PEG-scFVIII/D′D3-120-TH2. Advate® was used as a comparative group.

[0051] FIG. 18 shows the PK results of the PEGylated chimeric FVIII (PEG-scFVIII/D′D3-120, PEG-scFVIII/D′D3-120-TH1, PEG-scFVIII/D′D3-120-TH2) prepared according to one embodiment of the present invention. Advate® was used as a comparative group.

### BEST MODE FOR CARRYING OUT THE INVENTION

[0052] The present invention provides a technique for preventing or inhibiting FVIII from forming a complex with an endogenous vWF protein and at the same time inhibiting the binding of FVIII to LRP (low density lipoprotein receptor related protein) to extend the half-life of the FVIII protein. This results in a simultaneous reduction of vWF-dependent elimination along with delaying LRP and protease-dependent FVIII elimination, leading to an increased half-life.

[0053] Thus, in one embodiment, the present invention provides a chimeric protein in which human Factor VIII (Factor VIII or FVIII) and one or more vWF D′D3 domains are fused.

[0054] The chimeric protein according to the present invention can have a form of a single chain (sc) in which a light chain and a heavy chain of FVIII, which is composed of a light chain and a heavy chain in a wild form, are expressed as a single polypeptide, or it can have a form of dc (two chain) in which each of the light chain and heavy chain of FVIII is expressed as a separate polypeptide.

[0055] In one embodiment, the chimeric protein according to the present invention is embodied as a single chain (single polypeptide), wherein the vWF D′D3 domain is located in the N- or C-terminal direction of FVIII, and is linked by an amino acid linker having an enzyme cleavage site.

[0056] The chimeric protein according to the present invention is also embodied as a two chain (double polypeptides), wherein the vWF D′D3 domain can be linked in the N- or C-terminal direction of the heavy or light chain of FVIII. In one embodiment, it can be linked in the C-terminal direction of the B domain.

[0057] The FVIII protein that can be comprised in the chimeric protein according to the present invention may be of various lengths or origins, so long as it achieves the object according to the present invention through binding with vWF.

[0058] FVIII is composed of A1-A2-B-A3-C1-C2 domain and is synthesized in hepatocytes as a single chain protein. After synthesis, it is matured through processing to form a 280 kDa heterodimer composed of heavy and light chains. Among them, the light chain has a molecular weight of 80 kDa and is composed of A3-C1-C2 domain, and the heavy chain is composed of A1-A2-B domain and has a molecular weight of 90-200 kDa which varies greatly depending on the length of the B domain. The heterodimer is present in an inactivated state by binding to vWF in the blood, and when exposed to stimuli such as vascular injury, it is cleaved after arginine residue, that is, after the residues 372, 740 and 1689 based on the sequence of SEQ ID NO: 01, by thrombin. As a result, it is separated from vWF and activated to form a trimer of A1, A2 and A3-C1-C2. Then the trimer catalyzes the activation of FX by FIXa, and is rapidly decomposed.

[0059] The FVIII protein which can be comprised in the chimeric protein according to the present invention includes a full-length FVIII protein, a functional fragment thereof, a variant, an analogue or a derivative thereof, which has the function of a full-length wild-type FVIII Factor in the coagulation pathway. The term “FVIII protein” is used interchangeably with “FVIII polypeptide” or “FVIII”. Examples of FVIII functions include, but are not limited to, the ability to activate blood coagulation, the ability to act as a cofactor for Factor IX, or the ability to form a tenase complex with Factor IX in the presence of Ca²⁺ and phospholipids (thereafter, Factor X is transformed into an activated form Factor Xa).

[0060] Also, FVIII proteins of various origins may be used, e.g., FVIII proteins of humans, pig family, cat family, rat or chicken family. Non-limiting examples of FVIII amino acid and nucleic acid sequences may include GenBank NOs: NM_000132, NP_000123, 1012296 A, AAA52420.1, CAA25619.1, AAA52484.1, 1012298A, EAW72647.1, EAW72646.1, XP_001498954.1, ACK44290.1, AC095359.1, NP_001138980.1, ABZ10503.1, NP_032003.2 as disclosed.

[0061] In one embodiment according to the present invention, human FVIII is used, and for example, human FVIII can be represented by the sequence of SEQ ID NO: 01 (not including the signal peptide), and in the wild type sequence, the heavy chain is composed of the residues 1-740, the B domain is composed of the residues 741-1689 including a3 domain, and the light chain is composed of the residues 1690-2332.

[0062] Also, variants, derivatives, mutants, complexes or analogs of FVIII are also known in the art, which are included in the present invention. For example, U.S. Pat. No. 5,668,108 disclose a FVIII variant in which the aspartic acid at position 1241 is substituted with glutamic acid and has the attached nucleic acid changes; U.S. Pat. No. 5,149,637 describes a FVIII variant comprising a glycosylated or non-glycosylated C-terminal fragment; and U.S. Pat. No. 5,661,008 discloses a FVIII variant comprising amino acids 1-740 linked to amino acids 1649 to 2332 by at least three amino acid residues.

[0063] The FVIII which can be comprised in the chimeric protein according to the present invention includes FVIII in which its B domain is deleted, and examples of such FVIII include, but not limited to, the FVIII disclosed in U.S. Pat. Nos. 6,316,226, 6,346,513, 7,041,635, 5,789,203, 6,060,447, 5,595,886, 6,228,620, 5,972,885, 6,048,720, 5,543,502, 5,610,278, 5,171,844, 5,112,950, 4,868,112 and 6,458,563.

[0064] The FVIII which can be comprised in the chimeric protein according to the present invention includes FVIII in which its B domain is partially deleted, and such FVIII comprises a heavy chain and light chain, but some residues are deleted so as not to include cleavage sites of proteolytic enzymes such as furin.

[0065] In one embodiment, the partially deleted B domain includes a B domain which has at least five amino acid deletions in each of the N-terminal direction and C-terminal direction based on the 1648 and 1649 residue positions of SEQ ID NO: 01, the deletion including the residues, and/or a B domain which is partially deleted such that it includes 4 to 6 glycation sites

[0066] In one embodiment, the FVIII which can be comprised in the chimeric protein according to the present invention has B domain deletion, and such partially deleted B domain includes the amino acid residues 741 to 902 and 1654 to 1689 based on the SEQ ID NO: 01.

[0067] In another embodiment, such partially deleted B domain includes the amino acid sequence of amino acid residues 741 to 902 and 1654 to 1689 based on the SEQ ID NO: 01, and includes a B domain in which some of the residues, specifically the isoleucin residue at position 782, are substituted with cysteine for modification by a hydrophilic polymer.

[0068] In another embodiment, the FVIII which can be comprised in the chimeric protein according to the present invention in which its B domain is deleted has an amino acid sequence represented by SEQ ID NO: 03 or an amino acid sequence having 90% or more homology thereto. The B domain comprised in the amino acid sequence of SEQ ID NO: 03 includes the residues 741 to 902 based on SEQ ID NO: 01.

[0069] The FVIII which can be comprised in the chimeric protein according to the present invention may be modified by conjugation with a hydrophilic polymer at some amino acid residues of the A domain and/or B domain fragment.

[0070] Specifically, in the present invention, for inhibiting LRP binding of a chimeric protein according to the present invention through modification, modifications can be conducted in a site-specific manner and at various positions to achieve the above object.

[0071] In one embodiment, the conjugation positions in a chimeric protein according to the present invention is at least one selected from the group consisting of the amino acid residues 491, 495, 498 and 1806 based on the sequence of SEQ ID NO: 01 in the A domain, and at least one selected from the group consisting of amino acid residues 754, 781, 782, 788, 789, 825, and 897 based on the sequence of SEQ ID NO: 01 in the B domain.

[0072] In another embodiment according to the present invention, the chimeric protein is PEGylated, specifically, at the B-domain, and specifically, at the positions mentioned above.

[0073] In another embodiment according to the present invention, the chimeric protein is modified at the 782 nd isoleucine residue of the B domain, specifically, it is pegylated, and for the pegylation, the residue may be substituted with cysteine or a cysteine group may be inserted as described below.

[0074] The hydrophilic polymer which may be used in the modification of FVIII according to the present invention may be a hydrophilic polymer known in the art so long as they achieve the object, and examples thereof may include, but not limited to, polyethylene glycol (PEG), polyethylene oxide, dextran.

[0075] In one embodiment according to the present invention, PEG is used, specifically, PEG which has a molecular weight of 20 kDa or more is used. According to the present invention, PEG binds near to the LRP binding region and serves the function of inhibiting the binding of FVIII with LRP by PEG hindrance. Therefore, if the length of PEG is too short, it may not provide enough hindrance, and it is important that the length is 20 kDa or more. In one embodiment, specifically, PEG having a molecular weight of 40 kDa, 60 kDa or more is used.

[0076] The PEG used in the PEGylation in the modification according to the present invention can be linked to a corresponding residue using a variety of functional groups known in the art.

[0077] In one embodiment according to the present invention, PEG is linked in a site-specific manner through a free-SH group present in residues such as cysteine, in which case PEG can be linked through, but not limited to, thiol, orthopyridyl disulfide, acryloyl, sulfone or maleimide groups.

[0078] In the FVIII according to the present invention, the residues to be linked to a hydrophilic polymer may be substituted or inserted for modification by a hydrophilic polymer, and the residues for substitution or insertion may vary depending on the substance used for modification, and suitable residues can be selected by a person of ordinary skill.

[0079] In one embodiment according to the present invention, PEGylation is used as a modification, in which case a residue for modification may be substituted with cysteine or the cysteine residue may be inserted in a suitable position.

[0080] In one embodiment according to the present invention, the isoleucin residue at position 782 of the B domain is modified, specifically PEGylated, and the residue is substituted with cysteine for PEGylation.

[0081] The PEGylation reaction can be carried out using known methods. For example, cysteine or glutathione used for masking free cysteine is removed prior to the PEGylation reaction so that the free thiol of the introduced cysteine is restored. The above process can be conducted including a step of treating with reduction agents such as TCEP, DTT, beta-mercaptoethanol, cysteine, and glutathione (reduced type), and an oxidation step for restoring the FVIII's original disulfide bond cleaved by reduction. Expression of a protein having substitution with cysteine for modification can be conducted using a method known in the art. For example, in the case of a PEGylated protein, since the introduced free cysteine forms a disulfide bond with cysteine or glutathione, which is a low molecular substance including thiol, during expression or after excretion out of a cell, it is necessary to increase the PEGylation efficiency by masking the free cysteine and stabilizing it until the PEGylation.

[0082] The chimeric protein according to the present invention comprises the vWF D′D3 domain.

[0083] vWF (also known as F8vWF) is a large multimeric glycoprotein present in the blood plasma and produced in the endothelium, in the Weibel-Palade bodies, megakaryocytes (alpha granules of platelets), and subendothelian connective tissue. The basic vWF monomer is composed of 2813 amino acids (including signal peptides), and every monomer contains a number of specific domains with specific functions, i.e., the D′/D3 domain (which binds to Factor VIII), the A1 domain (which binds to platelet GPIb-receptor, heparin, and/or possibly collagen), the A3 domain (which binds to collagen), the C1 domain (in which the RGD domain binds to platelet integrin αIIβ3 when this is activated), and the “cysteine knot” domain at the C-terminal of the protein. the cysteine knot is also found in platelet-derived growth factor (PDGF), transforming growth factor-β (TGF-β) and β-human chorionic gonadotropin (HCG).

[0084] Non-limiting examples of vWF amino acid sequences and nucleic acid sequences encoding vWF or a portion thereof include GenBank NO: NP_000543, NM_000552, AAE20723, AAB59512, P04275, EAW88815, ACP57027, EAW88816, and AAD04919; U.S. Pat. No. 5,260,274; Titani et al., Biochemistry, 25: 3171-84 (1986); and Sadler et al., PNAS, 82: 6391-6398 (1985), as disclosed.

[0085] For example, the amino acid sequence of full length human vWF is represented by SEQ ID NO: 02 (not including the signal peptide). The “propeptide” portion (D1-D2) of vWF is composed of the amino acid residue 1 to Arg-741 and the “mature” vWF protein is composed of the amino acid residue 742 to 2791, based on SEQ ID NO: 02. The individual domains can be represented as D′: 742-842; D3: 843-1248; A1: 1249-1457; A2: 1458-1650; A3: 1651-1850; D4: 1851-2232; C1: 2233-2311; C2: 2312-2380; C3: 2407-2474; C4: 2475-2555; C5: 2556-2644; C6: 2625-2700 and CK: 2701-2791 (Lenting. P. J. BLOOD, 26 Mar. 2015. VOLUME 125, NUMBER 13). Or, by the EXPASY protein database nomenclature (worldwideweb.uniprot.org/uniprot/P04275) as the alternative vWF domain mapping and naming system, the individual domains can be represented as D1: 12-218; D2: 365-576; D′: 754-805; D3: 844-1052; A1: 1255-1431; A2: 1476-1643; A3: 1669-1849; D4: 1927-2131; B: 2233-2306 (named C1 in EXPASY); C1: 2407-2473 (named C2 in EXPASY); C2: 2558-2623 (named C3 in EXPASY); and CK: 2701-2790.

[0086] The vWF D′D3 domain comprised in a chimeric protein according to the present invention is fused with FVIII to inhibit a recombinant FVIII according to the present invention from binding to endogenous vWF (full-length vWF).

[0087] The vWF D′D3 domain comprised in the chimeric protein according to the present invention may be of various lengths or origins so long as it retains such activity, and includes mutants, derivatives, variants, complexes or analogues thereof.

[0088] In one embodiment, the vWF D′D3 domain comprised in the chimeric protein according to the present invention is composed of the amino acids 742-1248 or has at least 60%, 70%, 80%, 85%, 90%, 95% %, 96%, 97%, 98%, 99% or 100% homology thereto, and prevents the binding of endogenous vWF to the recombinant FVIII according to the present invention.

[0089] As mentioned above, the chimeric protein according to the present invention can be embodied as a single polypeptide expressing a light chain and a heavy chain of FVIII as one polypeptide, or double polypeptides expressing each of the light chain and heavy chain as a separate polypeptide.

[0090] With regard to FIG. 2A, when the chimeric protein according to the present invention is embodied as a single chain or a single polypeptide, the vWF D′D3 domain may be located in the N- or C-terminal direction of FVIII and may be linked by an amino acid linker that includes an enzyme cleavage site for the separation of D′D3 in the body.

[0091] In one embodiment, the FVIII and D′D3 domains comprised in the chimeric protein according to the present invention may be linked by a linker represented by the amino acid sequence of [G₄S]ₙ (G is glycine, S is serine, and n is an integer between 1 and 100), and the linker includes an enzyme cleavage site. The linker connects D′D3 and FVIII and has the function of providing flexibility for D′D3 to precisely bind to the vWF binding site of FVIII. Specifically, the position at which D′D3 can be fused to FVIII is the N-terminal or C-terminal of the FVIII heavy chain, or the N-terminal or C-terminal of the FVIII light chain. Considering that the D′domain, corresponding to the N-terminal of D′D3 domain, binds to the A3 domain portion of FVIII, and the D3 domain binds to the C2 domain portion of FVIII, it was determined that the distance between the D′ domain and the A3 domain of FVIII is the greatest when D′D3 is fused to the C-terminal of the FVIII light chain. Thus, when D′D3 is fused to FVIII, a flexible linker was chosen to allow D′D3 to bind to FVIII properly. Based on the previously reported crystal structure of FVIII, the linear distance from the C-terminal of the C2 domain to the N-terminal of the A3 domain was measured, and the length of the linker was selected by converting the distance to the number of amino acids. Therefore, if the length of the linker is shorter than the above linear distance, the D′ domain cannot reach the A3 domain of FVIII, and thus, if the length of the linker is too short, D′D3 cannot bind to the FVIII binding site precisely. Thus, a linker having a sufficient length satisfying the above conditions is required. The optimum length of the linker can vary depending on the location where D′D3 is fused. Linkers of various lengths may be used so long as they have the above function. In one embodiment, n is at least 6. In another embodiment, n may be 6, 8, 10, 12, 18, 24, or 60 in the formula.

[0092] In addition, since the linker contains an enzyme cleavage site, the linker also has the function of cleaving out vWF D′D3, or vWF D′D3 and the linker from FVIII when the FVIII is activated.

[0093] The enzyme cleavage site included in the linker according to the present invention may be linked in the N- or C-terminal direction of the linker.

[0094] In one embodiment according to the present invention, the enzyme cleavage site is a site that can be cleaved by thrombin, which can be represented by DFLAEGGGVR (SEQ ID NO: 36), TTKIKPR (SEQ ID NO: 37), or LVPRGS (SEQ ID NO: 38). In this case, the chimeric protein according to the present invention is cleaved in the body by thrombin to be activated as FVIIIa, and activates Factor X with activated Factor IX (FIXa) to convert it to activated Factor X (FXa).

[0095] Also, the enzyme cleavage site which can be included in the linker of the present invention may include a site that can be cleaved by FVIIa, FXa, or FXIa in the coagulant cascade as well as thrombin, which can be represented by ASKPQGRIVGG (SEQ ID NO: 39), IDGR (SEQ ID NO: 40), IEGR (SEQ ID NO: 41), or SKLTRAETVF (SEQ ID NO: 42).

[0096] In one embodiment according to the present invention, the enzyme cleavage site is included in the N-terminal direction of a linker, and when this site is cleaved by an enzyme such as thrombin, the linker and the D′D3 domain are separated from the FVIII.

[0097] In another embodiment according to the present invention, the enzyme cleavage site is included in the C-terminal direction of the linker, and when this site is cleaved by thrombin, the linker and D′D3 domain are separated from FVIII.

[0098] Referring to FIG. 2B, as described above, the chimeric protein according to the present invention is embodied in the form of a two chain in which each of the heavy chain and light chain is expressed as a separate polypeptide, or the heavy and light chains are expressed as two polypeptides of first and second polypeptides. Herein, the light chain and heavy chain can be coupled by a metal ion-mediated non-covalent bond.

[0099] When the chimeric protein according to the present invention is embodied as a two chain, the first polypeptide comprises A1, A2 domains and all or a portion of the B domain of the heavy chain of FVIII, and the second polypeptide comprises A3, C1, C2 domains and/or a portion of the B domain of the light chain of FVIII.

[0100] When the protein according to the present invention is embodied as a two chain, reference can be made to the foregoing and following descriptions regarding the B domain comprised in the first polypeptide.

[0101] When the protein according to the present invention is embodied as a two chain, the second polypeptide may not contain the B domain or a portion of the B domain may be used. In the latter case, for example, it includes 86 residues in the N-terminal direction from the C-terminal residue of the B domain. A portion of the B domain expressed by the second polypeptide is cleaved off when secreted outside the cell.

[0102] When the chimeric protein according to the present invention is embodied as a two chain, the vWF D′D3 domain is linked in the C-terminal direction of the first polypeptide. Herein, the B domain can act as a type of linker. When the protein according to the present invention embodied as a two chain, the B domain having the same or longer length can be used as compared to the case in which the protein is expressed in a single chain.

[0103] In one embodiment according to the present invention, the B domain of residues 741-902 and 1654-1689 is used based on the sequence of SEQ ID NO: 01 for a single chain, and the B domain of residues 741-936, which is 196 residues long, based on SEQ ID NO: 01 is used for a two chain. When expressed in the form of a two chain, the D′ domain may be linked to the B domain, which is for the purpose of structurally more natural linkage between the proteins to be fused, though not limited to this theory. Specifically, in one embodiment, the amino acid residue sequence of the C-terminal of the 196-residue-long B-domain used in the present invention is -SGGPLSLS. The amino acid sequence of the N-terminal of the D′ domain begins with SLSCR PPMVKLVCPA-. Thus, the 196-residue-long B domain was used to overlap the three amino acid residues of SLS as shown above. The 196-residue-long B-domain was calculated including up to SGGPL residues only among -SGGPLSLS.

[0104] A chimeric protein according to the present invention may comprise one or more vWF D′D3.

[0105] D′D3 is the two domains located at the N-terminal of vWF, and the D3 domain actually forms a dimer with vWF of another molecule through the D3 domain. Thus, D′D3 may be fused to FVIII in a monomeric or dimeric form in the present invention.

[0106] When a plurality of vWF D′D3, for example, two vWF D′D3 are comprised, they can be embodied as a first D′D3 linked to FVIII and a second D′D3 linked to the first D′D3.

[0107] When a plurality of vWF D′D3 are comprised, the first and second D′D3 may be linked through a linker, or the second D′D3 may be separately expressed to form a complex with a chimeric protein. For example, when the first and second D′D3 are linked using a linker as in scFVIII/D′D3/D′D3-120 chimeric protein, reference can be made to the foregoing description regarding the linker, but it does not include an enzyme cleavage site.

[0108] Also, when D′D3 is used in the form of a dimer, D′D3 can form a dimer through a S—S bond in the D3 domain. When a plurality of D′D3 are expressed in separate vectors as in a two chain, for example, the DNA of FVIII-D′D3 and the DNA of D′D3 may be expressed simultaneously in one cell to form a dimer between the D′D3s, and secreted outside of the cell, which may be then used after isolation and purification.

[0109] Further, the chimeric protein according to the present invention may further comprise one or more Fc proteins. If Fc is further fused to FVIII with D′D3, the effect of increasing the half-life through FcRn recycling by FVIII can be expected in addition to the effect of inhibiting the binding of vWF in the blood by D′D3. In one embodiment, specifically, Fc of about 50 kDa is fused, and steric hindrance by Fc may make it more difficult for the vWF in the blood to bind to the substance.

[0110] Therefore, Fc of various lengths or origins can be comprised so long as it achieves the object according to the present invention. In one embodiment according to the present invention, Fc represented by SEQ ID NO: 22 or Fc derived from human IgG are used.

[0111] When the chimeric protein according to the present invention is embodied as a single chain, Fc can be linked to vWF D′D3. Herein, they can be linked using a linker, and reference can be made to the foregoing description regarding the linker, but it does not include an enzyme cleavage site.

[0112] When the chimeric protein according to the present invention is embodied as a two chain, Fc may be linked to vWF D′D3 expressed as a portion of the heavy chain and/or to the C-terminal direction of the light chain. Herein, they may be linked using a linker. Reference can be made to the foregoing description regarding the linker. Specifically, when it is linked to a light chain, it includes an enzyme cleavage site, but when it is linked to D′D3, it does not include an enzyme cleavage site.

[0113] Two or more Fcs may be included in a chimeric protein according to the present invention.

[0114] When a plurality of Fcs, for example, two Fcs are comprised, they can be embodied as a first Fc linked to the chimeric FVIII and a second Fc linked to the first Fc in one embodiment. In another embodiment, the first Fc may be linked to the heavy chain of chimeric FVIII expressed as a two chain, and the second Fc may be linked to the light chain (or vice versa), in which case a complex such as a dimer can be formed between the plurality of Fcs.

[0115] When a plurality of Fcs are comprised, the first and second Fcs may be linked through a linker, or the second Fc region may be expressed in a separate vector in one cell to form a dimer between the Fcs in the cell, which may be then used after isolation and purification.

[0116] As described above, the chimeric protein according to the present invention may be embodied as a single chain or a two chain.

[0117] In one embodiment, the chimeric protein in a single chain according to the present invention may be represented by SEQ ID NOs: 6, 7, 8, 9, 10, 11, 12, 13, 14, 15, 16, 17, 18, 19, 21, or 25. The protein may form a complex with separate D′D3 and/or Fc, and in one embodiment, the chimeric protein of SEQ ID NO: 19 may form a complex with at least one D′D3 of SEQ ID NO: 20, or the chimeric protein of SEQ ID NO: 21 may form a complex with at least one Fc represented by SEQ ID NO: 22.

[0118] In one embodiment, the chimeric protein in a two chain according to the present invention can be represented by SEQ ID NOs: 4 and 5 (heavy chain and light chain, respectively), SEQ ID NOs: 23 and 24 (heavy chain and light chain, respectively), SEQ ID NOs: 26 and 27 (heavy chain and light chain, respectively), SEQ ID NOs: 28 and 29 (heavy chain and light chain, respectively), SEQ ID NOs: 30 and 31 (heavy chain and light chain, respectively), SEQ ID NOs: 32, and 33 (heavy chain and light chain, respectively), or SEQ ID NO: 34 and 35 (heavy chain and light chain, respectively). The protein may form a complex with separate D′D3 and/or Fc, and in one embodiment, a chimeric protein of SEQ ID NOs: 28 and 29 (heavy chain and light chain, respectively) or SEQ ID NOs: 32 and 33 (heavy chain and light chain, respectively) may form a complex with at least one Fc represented by SEQ ID NO: 22.

[0119] The amino acid sequences represented by SEQ ID NOs: 04 to 35 described above also include a protein having 90% or more homology thererto or substantially the same sequence.

[0120] Such substantial identity or homology can be determined using sequence comparison methods known in the art. The substantially identical sequences refer to those showing preferably at least 80% homology, specifically 85% or more, more specifically 90% or more homology, even more specifically 95% or more homology when the sequence disclosed herein and any other sequence are aligned for maximum correspondence between them and the aligned sequences are analyzed using algorithms commonly used in the art. Alignment methods for sequence comparison are well known in the art. For example, they are disclosed in: Smith and Waterman, Adv. Appl. Math. (1981) 2:482; Needleman and Wunsch, J. Mol. Bio. (1970) 48:443; Pearson and Lipman, Methods in Mol. Biol. (1988) 24: 307-31; Higgins and Sharp, Gene (1988) 73:237-44; Higgins and Sharp, CABIOS (1989) 5:151-3; Corpet et al., Nuc. Acids Res. (1988) 16:10881-90; Huang et al., Comp. Appl. BioSci. (1992) 8:155-65 and Pearson et al., Meth. Mol. Biol. (1994) 24:307-31. The NCBI Basic Local Alignment Search Tool (BLAST) (Altschul et al., J. Mol. Biol. 215: 403-10(1990)) is available from the National Center for Biological Information (NBCI, Bethesda, Md.), etc., for use in connection with the sequence analysis programs such as blastp, blasm, blastx, tblastn and tblastx. A sequence homology comparison method using this is available at http://www.ncbi.nlm.nih.gov/BI-AST/blast help.html.

[0121] The chimeric protein according to the present invention has a half-life which is extended by at least 1.5-fold, at least 2-fold, and at least 3-fold as compared to wild-type FVIII. Methods for measuring the half-life are disclosed, and a person skilled in the art will be able to select the appropriate method to measure the half-life and activity in consideration of the description of the present invention, the technology and the description of the references in the art, and then determine a chimeric protein to be included in the scope of the present invention based on the measurement results.

[0122] In another embodiment, the present invention also relates to a nucleic acid molecule or polynucleotide encoding a chimeric protein disclosed in the present invention, to a vector comprising the polynucleotide, or to a cell (line) transformed with the vector.

[0123] The nucleic acid molecule according to the present invention includes one that has been codon-optimized for the type of cells in which the chimeric protein according to the present invention is expressed. In one embodiment according to the present invention, the nucleic acid sequence is optimized for the CHO codon, and such nucleic acid sequence may be represented by the sequence of SEQ ID NO: 58, 59, 60, 62, 63, 64, 65, or 66.

[0124] A nucleic acid molecule encoding a chimeric protein according to the present invention also includes one which encodes FVIII which is substantially identical and biologically equivalent, as described above.

[0125] Also, the nucleic acid molecules encoding the chimeric protein according to the present invention may also be used by cloning them into various expression vectors for various purposes. The specific composition of the expression vector may vary depending on the host cell in which the chimeric protein according to the present invention is to be expressed. However, it comprises the sequence which regulates the expression of the nucleic acid molecule of the present invention to mRNA or the expression of the mRNA to a protein, such as, for example, a promoter and/or an enhancer, and the like. Various vectors and regulatory sequences which may be used for the above or various other purposes are known in the art and may be selected appropriately by a person skilled in the art in light of the specific objects and effects of the present invention, and such vectors and sequences may include, for example, those disclosed in the Examples and Figures of the present invention, but are not limited thereto.

[0126] A vector comprising a nucleic acid molecule encoding a chimeric protein according to the present invention may be prepared by methods known in the art, for example, by operatively linking a nucleic acid molecule encoding a chimeric protein according to the present invention to a promoter and/or an enhancer. In one embodiment, it is inserted into a recombinant expression vector which is capable of expressing a foreign gene in a cell, and examples of such vectors include, but are not limited to, general protein expression vectors such as pMSGneo and pcDNA3.1(+). The pMSGneo vector is an expression vector containing a MAR (Matrix attachment region) element that binds to a nuclear matrix, and the MAR element plays the role of enhancing gene expression by inducing position-independent expression when used in an expression vector. Therefore, when the pMSGneo vector is used, a stable and high expression level can be achieved. In addition, the pcDNA3.1 (+) vector contains a strong CMV promoter and thus it is widely used for protein expression. In one embodiment of the present invention, the vector shown in FIG. 3 is used. The chimeric protein according to the present invention can be expressed as a single polypeptide or two polypeptides as described above.

[0127] In addition, the recombinant expression vector comprising a nucleic acid molecule encoding a chimeric protein according to the present invention may be transfected into a suitable host cell for various purposes. The host cell includes both prokaryotic and eukaryotic cells in which the vector according to the present invention can be amplified and/or the nucleic acid molecule contained in the vector can be expressed. Various cells which can be used for the above purpose are known in the art, and a person skilled in the art will be able to select appropriate cells taking into consideration the specific purposes and effects of the present invention, including those described in the Examples and Figures of the present invention, but is not limited thereto. For example, E. coli, mammalian cells, yeasts, plant cells, and insect cells can be included. In one embodiment according to the present invention, eukaryotic cells, in particular, mammalian cell lines, are used for the expression of recombinant FVIII. A person skilled in the art, taking into consideration the characteristics of the recombinant FVIII according to the present invention, will be able to select appropriate cell lines capable of expressing proteins having such characteristics, and for example, CHO, BHK, COST HEK cell lines, etc., which are known in the art may be used as such mammalian cell lines, preferably, CHO cell line, specifically CHO-S cell line or CHO-K1 cell line or CHO-DG44 cell line, or HEK cell line, specifically HEK293 cell line, may be used, but the present invention is not limited thereto.

[0128] The vector according to the present invention is transferred to the above host cells for expression. Methods for transferring vectors to such host cells are known in the art, which may be implemented by known methods in the art, such as calcium phosphate precipitation, a shotgun method, a method using liposome, a nanoneedle method or electroporation, but are not limited thereto.

[0129] In another aspect, the present invention also relates to a method for producing a chimeric protein comprising transfecting a vector according to the present invention described above to a eukaryotic cell; culturing the cell in a culture solution; collecting the culture solution to purify a cysteine-introduced chimeric protein; and treating the purified cysteine-introduced protein with a PEGylation buffer solution; restoring the free thiol group of the introduced cysteine through a reduction process; oxidizing the resultant to recover a separated disulfide bond in the chimeric protein during the reduction process; specifically PEGylating the cysteine on the chimeric protein restored with a reduced thiol group, and isolating the PEGylated chimeric protein.

[0130] Reference can be made to those described in the Examples herein regarding specific vectors, cells and processing steps used in the method according to the present invention.

[0131] The chimeric protein according to the present invention can be useful for blood coagulation of a patient with a disease requiring blood coagulation, hemophilia, specifically, hemophilia A, or for the treatment of hemophilia A.

[0132] In another embodiment, the present invention also provides a method for treating hemophilia, specifically, hemophilia A, or for blood coagulation, comprising administering, in a therapeutically effective amount, a chimeric protein according to the present invention, a nucleic acid molecule encoding the same, a vector comprising the nucleic acid molecule, or a cell comprising the nucleic acid molecule or vector, or a pharmaceutical composition containing a pharmaceutical acceptable carrier in addition to the above ingredients, as described above, to a patient with a disease requiring blood coagulation, or hemophilia, specifically, hemophilia A.

[0133] The chimeric protein according to the present invention, a nucleic acid molecule encoding the same, a vector comprising the nucleic acid molecule can be provided in a form of a pharmaceutical composition containing a pharmaceutical acceptable carrier in addition to the above ingredients for treating hemophilia, specifically, hemophilia A.

[0134] In addition, the pharmaceutical composition of the present invention can be used alone or in combination with other drug therapies and methods using a biological response modifier.

[0135] In addition to the above-mentioned active ingredients, the composition of the present invention may by prepared by further comprising at least one pharmaceutically or physiologically acceptable carrier.

[0136] The term “carrier” as used herein is intended to mean a pharmaceutically acceptable carrier, excipient, or stabilizer that is non-toxic to a cell or mammal exposed to the same at a dose and concentration employed. Examples of such carriers include saline, Ringer's solution, buffered saline, buffers such as phosphate, citrates and other organic acids, antioxidant such as ascorbic acids, polypeptides with low molecular weight (about less than 10 amino acids), proteins such as serum albumin, gelatin or immunoglobulin; hydrophilic polymer such as polyvinylpyrrolidone, amino acids such as glycine, glutamine, asparagine, arginine or lysine, carbohydrates such as monosaccharides, disaccharides, and glucose, mannose or dextrin, chelating agents such as EDTA, sugar alcohols such as mannitol or sorbitol, counter ions for salt formation such as sodium, and/or non-ionic surfactant such as Tween, polyethylene glycol (PEG) and PLURONICS®.

[0137] If desired, the composition may further comprise other additives known in the art such as antioxidants, buffers, antibacterial agents. The present composition may be formulated into injectable formulations such as solution, suspension, emulsion, etc., by adding diluents, dispersing agents, surfactants, binders and lubricants. Further, the composition can be preferably formulated depending on the disease or ingredients, using appropriate methods in the art or as disclosed in Remington's Pharmaceutical Science (recent edition; Mack Publishing Company, Easton Pa.).

[0138] The composition of the present invention is preferably administered parenterally (for example, intravenous, subcutaneous, intraperitoneal) according to a desired method. The dosage varies depending on the disease condition and weight of a patient, degree of the disease, the type of a drug, the administration route and time, but can be appropriately selected by a person skilled in the art.

[0139] The composition according to the present invention is administered in a therapeutically effective amount. In the present invention, “a therapeutically effective amount” refers to an amount sufficient to treat a disease with a reasonable benefit/risk ratio which is applicable to a medicinal treatment. The level of effective dose may be determined depending on factors including types of diseases of patients, severity, activity of a drug, sensitivity to a drug, administration time, administration routes, excretion rates, period of treatment, a simultaneously used drug, and other factors well known in the medicinal field. The composition of the present invention may be administered as a single therapeutic agent or administered in combination with other therapeutic agents. Also, the composition of the present invention may be administered with a conventional therapeutic agent sequentially or simultaneously, and the composition may be used for single or multiple administrations. It is important to administer the composition at a minimal dose which can lead to a maximum effect without side effects in consideration of all of the factors described above, and the doses may be easily determined by a person skilled in the art.

[0140] As used herein, the term “treatment” refers to any action that improves or alters the symptoms of a disease in a beneficial way by administration of a composition of the present invention. The subjects for whom the method according to the present invention is used may be primates, including humans, but are not limited thereto.

[0141] The recombinant chimeric protein according to the present invention may be administered as it is or in form of a composition as described above in a therapeutically effective amount to a subject with hemophilia or in need of blood coagulation and may be provided in the form of a blood coagulation method or a method for treating hemophilia, and reference can be made to the foregoing description.

[0142] Hereinafter, the present invention is explained in detail by Examples. The following Examples are intended to further illustrate the present invention without limiting its scope.

### MODE FOR THE INVENTION

### Example

### Example 1. Construction of Chimeric FVIII

### Example 1-1. Preparation of scFVIII (Single-Chain FVIII)

[0143] For the construction of FVIII expressed in a single chain form, FVIII was constructed in which a portion of the B domain including the furin cleavage site, the residue 1648 (based on the amino acid sequence of SEQ ID NO: 01 which represents the full-length FVIII amino acid sequence), was deleted. Each constructed scFVIII comprises a B domain of a specific length counting from the N-terminal (the 741st amino acid residue of SEQ ID NO: 01) of the B domain, and the B domain comprised was constructed so as to contain the originally existing sugar chain as it is, and the 782 nd isoleucin residue located in the B domain was modified by cysteine for site-specific PEGylation.

[0144] The preparation method is as follows.

[0145] Each scFVIII comprising the B domain having deletions shown in Table 1 was synthesized based on the human FVIII nucleic acid sequence (NM000132). In order to prepare the scFVIII gene expression vector, entire gene of the CSL form (leader-heavy chain-B domain (741-764, 1653-1689)-light chain) was synthesized by GeneArt based on the human FVIII nucleic acid sequence (NM000132) to include the PacI-XhoI enzyme cleavage site at the 5′ end and PacI-XhoI enzyme cleavage site at the 3′ end. The pcDSW-CSL expression vector was constructed by cloning the synthesized gene into the NotI/XhoI site of the pcDSW vector. The accuracy of the expression vector construction was confirmed by size comparison of the cleaved bands using the AsisI/PacI enzyme. Then, each scFVIII in which B domain was deleted was synthesized by GeneArt to include a sequence from the BamHI site (GGATCC) present in the A2 domain of the FVIII heavy chain to the PacI enzyme cleavage site at the 3′ end of the light chain. Then, the pre-existing FVIII region was removed from the previously prepared pcDSW-CSL expression vector using the enzyme BamHI/PacI, and the synthesized gene was cleaved with BamHI/PacI enzyme and cloned into the BamHI/PacI site of the pcDSW-CSL expression vector to construct the pcDSW-scFVIII expression vector. The accuracy of the expression vector construction was confirmed by size comparison after cleavage with BamHI/PacI enzyme.

TABLE 1
scFVIII constructed in the present invention

| | | | A portion of B | | |
|---|---|---|---|---|---|
| | | Heavy | domain sequence | | |
| Single chain | | chain | (including a3 | Light chain | Number of B |
| FVIII | | sequence | domain sequence) | sequence | domain |
| G4 | Scf4 | 1-740 | (741-902) - - - | 1690-2332 | 4(757, 784, |
| | | | (1654-1689) | | 828, 900) |

[0146] As for scFVIII G4 (B3, SEQ ID NO: 3) in which cysteine is introduced, the gene was synthesized by GeneArt to include a sequence from BamHI site (GGATCC) in the cysteine substitution site and FVIII heavy chain A2 domain to the PacI enzyme cleavage site at the 3′ end of the light chain. Then, the pre-existing FVIII region was removed from the previously prepared expression vector pcDSW-scFVIII G4 using the enzyme BamHI/PacI, and the synthesized gene was cloned into the BamHI/PacI site to construct pcDSW-scFVIII G4 (B3) expression vector in which cysteine was substituted, and the accuracy of expression vector construction was confirmed by sequence analysis.

### Examples 1-2. Preparation of dcFVIII (Two Chain FVIII)

[0147] For the construction of FVIII expressed in a dimeric form containing D′D3, the heavy chain containing D′D3 and light chain were expressed using different vectors in one cell. The heavy chain containing D′D3 contains the B domain corresponding to B3 used in Example 1-1, and the light chain was produced with reference to the vector expressing the light chain described in Korean Patent No. 251286.

### Examples 1-3. Preparation of Chimeric FVIII

[0148] The chimeric FVIII was fused with one or two D′D3 based on the single chain FVIII and dimer FVIII prepared in Examples 1-1 and 1-2, and a linker was used for the effective binding of the fused D′D3 to FVIII. For the linker, a portion of the B domain of FVIII or [G₄S]ᵣᵢ was used. And, some chimeric FIII contained Fc in addition to the composition described above (FIGS. 2 and 3, and Table 2).

TABLE 2
Chimeric FVIII constructed in the present invention

| | | | | | Presence | | Number |
|---|---|---|---|---|---|---|---|
| | Amino | Nucleic | | | or | | of |
| | acid | acid | | | absence | Type | amino |
| | Sequence | Sequence | | D′D3 | of | of | acids of |
| Name | number | number | FVIII form | form | Fc | linker | linker |
| dcFVIII/D′D3-HC | 04 and 05: | 46, 47 | Two | Monomer | Absent | B | 196 |
| | Heavy chain | | chain | | | domain | |
| | and light | | | | | | |
| | chain, | | | | | | |
| | respectively | | | | | | |
| scFVIII/D′D3-6 | 06 | 48 | Single | Monomer | Absent | G₄S | 6 |
| | | | chain | | | | |
| scFVIII/D′D3-10 | 07 | 49 | Single | Monomer | Absent | G₄S | 10 |
| | | | chain | | | | |
| scFVIII/D′D3-20 | 08 | 50 | Single | Monomer | Absent | G₄S | 20 |
| | | | chain | | | | |
| scFVIII/D′D3-30 | 09 | 51 | Single | Monomer | Absent | G₄S | 30 |
| | | | chain | | | | |
| scFVIII/D′D3-40 | 10 | 52 | Single | Monomer | Absent | G₄S | 40 |
| | | | chain | | | | |
| scFVIII/D′D3-50 | 11 | 53 | Single | Monomer | Absent | G₄S | 50 |
| | | | chain | | | | |
| scFVIII/D′D3-60 | 12 | 54 | Single | Monomer | Absent | G₄S | 60 |
| | | | chain | | | | |
| scFVIII/D′D3-90 | 13 | 55 | Single | Monomer | Absent | G₄S | 90 |
| | | | chain | | | | |
| scFVIII/D′D3-120 | 14 | 56 | Single | Monomer | Absent | G₄S | 120 |
| | | | chain | | | | |
| scFVIII/D′D3-120-TH1 | 15 | 57, | Single | Monomer | Absent | G₄S | 120 |
| | | 58, 59 or | chain | | | | |
| | | 60 (codon- | | | | | |
| | | optimized) | | | | | |
| scFVIII/D′D3-120-TH2 | 16 | 61 | Single | Monomer | Absent | G₄S | 120 |
| | | | chain | | | | |
| scFVIII/D′D3-300 | 17 | 62 | Single | Monomer | Absent | G₄S | 300 |
| | | | chain | | | | |
| scFVIII/D′D3/D′D3-120 | 18 | 63 | Single | Dimer | Absent | G₄S | 120 |
| | | | chain | | | | |
| | | | | | | G₄S | 30 |
| Complex of | 19 and 20: | 64 and 65 | Single | Dimer | Absent | G₄S | 120 |
| D′D3/scFVIII-120 and | Single chain | Single | chain | | | | |
| D′D3 | FVIII and | chain FVIII | | | | | |
| | D′D3, | and D′D3, | | | | | |
| | respectively | respectively | | | | | |
| Complex of | 21 and 22: | 66 and 67: | Single | Monomer | Present | G₄S | 120 |
| scFVIII/D′D3/Fc-120 | Single chain | Single | chain | | | | |
| and Fc | FVIII and | chain FVIII | | | | | |
| | Fc, | and Fc, | | | | | |
| | respectively | respectively | | | | | |
| | | | | | | G₄S | 30 |
| dcFVIII/D′D3/D′D3 | 23 and 24 | 68 and 69 | Two | Dimer | Absent | B | 196 |
| | Heavy | Heavy | chain | | | domain | |
| | chain and | chain and | | | | | |
| | light chain, | light chain, | | | | | |
| | respectively | respectively | | | | | |
| | | | | | | G₄S | 30 |
| scFVIII/D′D3/Fc/Fc-120 | 25 | 70 | Single | Monomer | Present | G₄S | 120 |
| | | | chain | | | | |
| | | | | | | G₄S | 30 |
| | | | | | | G₄S | 30 |
| dcFVIII/D′D3/Fc-HC/ | 26, and 27 | 71 and 72 | Two | Monomer | Present | B | 196 |
| Fc-LC | Heavy | Heavy | chain | | | domain | |
| | chain and | chain and | | | | | |
| | light chain, | light chain, | | | | | |
| | respectively | respectively | | | | | |
| | | | | | | G₄S | 30 |
| | | | | | | G₄S | 30 |
| Complex of | 28, 29, and | 73, 74, and | Two | Monomer | Present | B | 196 |
| dcFVIII/D′D3/Fc-HC/HC/ | 22 | 67 | chain | | | domain | |
| LC and Fc | Heavy | Heavy | | | | | |
| | chain, light | chain, light | | | | | |
| | chain and | chain and | | | | | |
| | Fc, | Fc, | | | | | |
| | respectively | respectively | | | | | |
| | | | | | | G₄S | 30 |
| dcFVIII/D′D3/Fc/Fc-HC | 30 and 31 | 75 and 76 | Two | Monomer | Present | B | 196 |
| | Heavy | Heavy | chain | | | domain | |
| | chain and | chain and | | | | | |
| | light chain, | light chain, | | | | | |
| | respectively | respectively | | | | | |
| | | | | | | G₄S | 30 |
| | | | | | | G₄S | 30 |
| Complex of | 32, 33, and | 77, 78, and | Two | Monomer | Present | B | 196 |
| dcFVIII/D′D3-HC/ | 22 | 67 | chain | | | domain | |
| Fc-LC/ | Heavy | Heavy | | | | | |
| HC/LC and Fc | chain, light | chain, light | | | | | |
| | chain and | chain and | | | | | |
| | Fc, | Fc, | | | | | |
| | respectively | respectively | | | | | |
| | | | | | | G₄S | 30 |
| dcFVIII/D′D3-HC/Fc/ | 34 and 35 | 79 and 80 | Two | Monomer | Present | B | 196 |
| Fc-LC/HC/LC | Heavy | Heavy | chain | | | domain | |
| | chain and | chain and | | | | | |
| | light chain, | light chain, | | | | | |
| | respectively | respectively | | | | | |
| | | | | | | G₄S | 30 |
| | | | | | | G₄S | 30 |

[0149] Cloning of chimeric FVIII was carried out using scFVIII G4 (B3) described in Patent Example 1-1. As for the FVIII heavy chain of SEQ ID NO: 04, the gene was synthesized by GeneArt to include a sequence from the KpnI enzyme cleavage site present in the A2 domain of FVIII to the PacI enzyme cleavage site at the 3′ end. Then, pre-existing FVIII region was removed from the scFVIII G4 (B3) expression vector pcDSW-scFVIII G4 (B3) using the enzyme KpnI/PacI, and the synthesized gene was cloned into the KpnI/PacI site to construct an expression vector corresponding to the heavy chain of SEQ ID NO: 4, and the accuracy of expression vector construction was confirmed by length analysis through enzyme cleavage. As for the light chain of SEQ ID NO: 05, the gene was synthesized by GeneArt to include a sequence from the Asis-Leader sequence at the 5′ end to the BspEI enzyme cleavage site present at the FVIII light chain C1 domain. Then, the pre-existing FVIII region was removed from the scFVIII G4 (B3) expression vector pcDSW-scFVIII G4 (B3) prepared in Example 1-1 using the enzyme AsiSI/BspEI and the synthesized gene was cloned into the AsiSI/BspEI site to construct an expression vector corresponding to the light chain of SEQ ID NO: 5, and the accuracy of vector construction was confirmed by length analysis through enzyme cleavage. The genes of SEQ ID NO: 06, 07, 08, 09, 10, 11, 12, 13, 14, 15, and 16 were synthesized by GeneArt to include a sequence from the B spEI enzyme site sequence present at the C1 domain of the FVIII light chain to the PacI enzyme cleavage site at the 3′ end. Then the pre-existing FVIII region was removed from the scFVIII G4 (B3) expression vector pcDSW-scFVIII G4 (B3) prepared in Example 1-1 using the enzyme BspEI/PacI, and the synthesized genes were cloned into the BspEI/PacI site to construct chimeric FVIII expression vectors corresponding to SEQ ID NOs: 06, 07, 08, 09, 10, 11, 12, 13, 14, 15, and 16, and the accuracy of expression vector construction was confirmed by length analysis and sequence analysis through enzyme cleavage. As compared to the SEQ ID NO: 14, the peptide represented by SEQ ID NO: 15 differs in the position of the thrombin cleavage site in the linker, and the peptide represented by SEQ ID NO: 16 differs in the position of the thrombin cleavage site and the sequence of the linker itself, and they were designated as TH1 and TH2.

[0150] As for the SEQ ID NOs: 17, 18, and 21, CHO codon optimization and gene synthesis were carried out by Cosmogenetech to include a sequence from the BspEI enzyme site in the FVIII light chain C1 domain to the PacI enzyme cleavage site at the 3′ end. Then, the pre-existing FVIII region was removed from the scFVIII G4 (B3) expression vector pcDSW-scFVIII G4 (B3) prepared in Example 1-1 using the enzyme BspEI/PacI, and the synthesized genes were cloned into the BamHI/PacI site to construct chimeric FVIII expression vectors corresponding to SEQ ID NO: 17, SEQ ID NO: 18, and SEQ ID NO: 21, and the accuracy of expression vector construction was confirmed by length analysis through enzyme cleavage.

[0151] As for the SEQ ID NO: 19, CHO codon optimization and gene synthesis were carried out by Cosmogenetech to include a sequence from the NotI-AsiSI enzyme cleavage site added at the 5′ end to the AflII enzyme cleavage site present in the FVIII heavy chain A1 domain. Then, the pre-existing FVIII region was removed from the scFVIII G4 (B3) expression vector pcDSW-scFVIII G4 (B3) prepared in Example 1-1 using the enzyme AsiSI/AflII, and the synthesized gene was cloned into the BamHI/PacI site to construct the chimeric FVIII expression vector corresponding to SEQ ID NO: 19, and the accuracy of expression vector construction was confirmed by length analysis through enzyme cleavage.

[0152] As for SEQ ID NO: 20, the gene represented by SEQ ID NO: 64 synthesized in Cosmogenetech was removed of the pre-existing region gene using the enzyme MfeI/XbaI, and the synthesized gene represented by SEQ ID: 63 was treated with the enzyme MfeI/XbaI to obtain an insert, which was then subjected to primary cloning into the MfeI/XbaI site. To transfer the primary cloned gene to an expression vector, the pre-existing FVIII region was removed from the scFVIII G4 (B3) expression vector pcDSW-scFVIII G4 (B3) prepared before using the enzyme NotI/PacI, and then the primary cloned gene was digested with enzyme NotI/PacI to cleave out the insert, which was cloned into the NotI/PacI site of the expression vector to construct an expression vector corresponding to SEQ ID NO: 20. The accuracy of the expression vector construction was confirmed by length analysis through enzyme cleavage.

[0153] As for SEQ ID NO: 22, the gene was synthesized by GeneArt to include AsisI at the 5′ end and the Pad enzyme cleavage site at the 3′ end. Then, the pre-existing FVIII region was removed from the scFVIII G4 (B3) expression vector pcDSW-scFVIII G4 (B3) prepared in Example 1-1 using the enzyme AsisI/PacI, and the synthesized gene was cloned into the AsisI/PacI site to construct an expression vector corresponding to SEQ ID NO: 22. The accuracy of the expression vector construction was confirmed by length analysis through enzyme cleavage.

[0154] In addition, as for SEQ ID NO: 15, a CHO expression vector was further prepared to prepare the CHO transformed cell line. The gene was either synthesized to include AatII-AscI at the 5′ end and the BsiWI-PacI enzyme cleavage site at the 3′ end, or synthesized to be optimized for the CHO expression by Biobasics Co., GeneArt Co., and Genscript Co. The synthesized gene was cloned into the AscI/PacI site of the CHO expression vector pMSID2 to construct a CHO expression vector corresponding to SEQ ID NO: 15. The accuracy of expression vector construction was confirmed by length analysis through enzyme cleavage.

### Example 2. Expression of Chimeric FVIII

[0155] The chimeric FVIII constructed in Example 1 was expressed in cells, and the cells showing expression were cultured in a cell culture medium. For the expression, the expression vector constructed in Example 1 was transferred and imported to Expi293™ cells using the Expi293™ Expression System Kit (Thermofisher Co., Catalog Number A14635). Transfection method and culture were carried out as follows based on 30 mL scale, and the actual culture volume was adjusted depending on the amount of protein requirement. 24 hours before transfection, Expi293F™ cells were subcultured according to the expected requirement amount using Expi293 culture medium at 2.0×10⁶ cells/mL. On the day of transfection, the number of cells and cell viability were measured, and transfection was carried out when the cell viability was 95% or higher. Expi293 culture medium was added to a 125 mL flask to obtain an amount of 7.5×10⁷ cells, and adjusted to 25.5 mL. 30 μg of the expression vector constructed in Example 1 was mixed with Opti-MEM to a total volume of 1.5 mL. 80 μL of the transfection reagent was mixed with Opti-MEM to a total volume of 1.5 mL and incubated at room temperature for 5 minutes. 5 minutes later, the Opti-MEM containing the transfection reagent was added to Opti-MEM containing DNA, which was then gently mixed. The reaction was carried out at room temperature for 20 to 30 minutes. 3 mL of DNA: transfection reagent complex was added dropwise to the 125 mL flask Expi293™ cells prepared before (total volume: 28.5 mL) and incubated at 37° C. in a 5% CO₂ shaking incubator at 125 rpm. After 16 to 20 hours, 150 μL and 1.5 mL of Enhancer 1 and Enhancer 2, respectively, were added thereto and the cells were cultured at 34° C. in a 5% CO₂ shaking incubator at 125 rpm. On the second day of culture, all cells were centrifuged and the pre-existing culture medium was completely removed, and all the cells were dispensed in 30 mL of new culture medium and cultured at 34° C. in a 5% CO₂ shaking incubator at 125 rpm. On the third day of introduction, all cells which expressed chimeric FVIII were centrifuged and the culture solution was recovered. The cells remaining after the recovery of the medium were dispensed in a new culture medium of the same volume and cultured at 34° C. for 1 day. This process was repeated until the fifth day of culture, and the culture solution on the 3rd, 4th, and 5th days was recovered, and the activity analysis and purification of chimeric FVIII introduced with cysteine were carried out. FVIII expression was carried out in CHO-DG44 cells by a similar method as above.

[0156] In addition, CHO transformation cell line was prepared and chimeric FVIII was expressed. 24 hours before transfection, CHO DG44 cells were subcultured in CDM4CHO medium (Hyclone, Catalog Number, SH30557.02) in an amount of 5-6×10⁵ cells/mL according to the required amount. On the day of transfection, the cells were dispensed in an amount of 3 mL to the 125 mL flask using OptiPro medium (Thermo fisher, Catalog Number 12309-019) at 1×10⁷ cells/mL. 30 μg of the CHO expression vector constructed in Example 1 was mixed with OptiPro to a total volume of 1.5 mL. The resultant mixture was mixed using 90 μL PEI MAX (1 μg/μL) and OptiPro to a total volume of 1.5 mL. After 5 minutes, 1.5 mL of OptiPro containing PEI MAX was added to 1.5 mL of OptiPro containing DNA, which was then gently mixed for 30 minutes at room temperature. 3 mL of DNA: PEI complex was added dropwise to CHO DG44 cells prepared before. The cells were incubated at 37° C. in a 5% CO₂ shaking incubator at 140 rpm for 4 hours. 24 mL of CDM4CHO medium was added thereto and the cells were incubated at 140 rpm, and cell screening was carried out after 48 hours.

[0157] The transformed CHO DG44 cells were suspended into a T-175 flask using CDM4CHO culture medium containing 20 nM MTX at 5×10⁶ cells/ml to obtain a volume of 50 ml, which were subjected to static culture for 7 days at 37° C. in a 5% CO₂ incubator. If the number of cells was insufficient, the total volume was reduced and proceeded. After 7 days of cell screening, the number of cells were counted, and the cells were subcultured in a 125 mL flask at 5×10⁵ cells/mL using a culture medium containing 20 nM MTX at 37° C. in a 5% CO₂ shaking incubator at 140 rpm. The cells were subcultured in a 125 mL flask at the interval of 3 to 4 days, and when the cell concentration was 1×10⁶ cells/mL or higher and the viability was 90% or higher, it was determined that the screening was completed.

[0158] For the expression of chimeric FVIII, the CHO transformation cell line was inoculated at 3×10⁵ cells/mL and incubated at 37° C. in a 5% CO₂ shaking incubator at 140 rpm. On the fourth day of culture, all cells were centrifuged, and the pre-existing culture medium was completely removed, and all cell were dispensed in a new culture medium of the same volume and incubated at 140 rpm for 1 day at 31° C. in a 5% CO₂ shaking incubator. The culture medium exchange and culture process was repeated until the 8th day of culture, and culture solution on the 6th, 7th, and 8th day was recovered, and the activity analysis and purification of chimeric FVIII was conducted.

### Example 3. Confirmation of Chimeric FVIII Expression

### Example 3-1. Measurement of Chimeric FVIII Expression Level

[0159] Two of the widely used FVIII activity measurement test methods are the one-stage clotting method and the chromogenic method. Among them, chimeric FVIII expression level was measured by the chromogenic method. Chromogenic method is a method of measuring FVIII activity based on the degree of color development of a chromogenic substance, where FIXa, FX, thrombin, calcium, phospholipids and a FVIII sample are mixed and a chromogenic substrate which shows color development upon cleavage by FXa is added thereto in order to measure the amount of FXa activated by FVIII sample.

[0160] As for the experimental method of chromogenic method, the chromogenic assay kit sold by CHROMOGENIX Co., was used as the endpoint method, and the test was conducted by modifying the test method provided by the manufacturer to be suitable for the present test. Samples are diluted to be in the standard range (0.25-1 IU/mL) using 1× dilution buffer. Calibration plasmas were prepared using 1× dilution buffer at the concentrations of 0, 0.25, 0.5, and 1 IU/mL. The prepared samples and 10 μL of the calibration plasma were diluted by 790 μL of 1× dilution buffer, and 50 μL of the diluted samples were dispensed into a 96-well plate and allowed to stand at 37° C. for 5 minutes. 50 μL of a factor reagent was dispensed into each well using an automatic dispenser pipette, which was then reacted for 2 minutes at 37° C. 50 μL of a substrate was dispensed into each well, which was then allowed to stand for 2 minutes at 37° C. for color development. The reaction was stopped by adding 50 μL of 2% citric acid to the samples showing color development. The absorbance was measured at a wavelength of 405 nm to draw a linear calibration curve, and the absorbance of the sample was substituted into the calibration curve to measure the activity of the sample.

TABLE 3
Chimeric FVIII expression level

| | | | Expression |
|---|---|---|---|
| | | | level |
| Name | Host | Condition | (IU/mL) |
| scFVIII-B3 | HEK293 | Transient expression | 1.6-8.0 |
| scFVIII/D′D3-30 | HEK293 | Transient expression | 5.3 |
| scFVIII/D′D3-40 | HEK293 | Transient expression | 1.6 |
| scFVIII/D′D3-50 | HEK293 | Transient expression | 3.7 |
| scFVIII/D′D3-60 | HEK293 | Transient expression | 2.1 |
| scFVIII/D′D3-90 | HEK293 | Transient expression | 6.3 |
| scFVIII/D′D3-120 | HEK293 | Transient expression | 4.7 |
| scFVIII/D′D3-120-TH1 | HEK293 | Transient expression | 2.8 |
| scFVIII/D′D3-120-TH1 | CHO | Stable expression | 0.06-8.3 |
| scFVIII/D′D3-120-TH2 | HEK293 | Transient expression | 3.5 |
| scFVIII/D′D3-300 | HEK293 | Transient expression | 2.5 |
| scFVIII/D′D3/D′D3-120 | HEK293 | Transient expression | 0.3 |
| scFVIII/D′D3/Fc-120, Fc | HEK293 | Transient expression | 1.4 |
| dcFVIII/D′D3-HC | HEK293 | Transient expression | 0.1 |

[0161] The measured expression levels of scFVIII-B3, which was not fused with the fusion with D′D3 ranged from 1.6 to 8.0 IU/mL. In the case of chimeric FVIII fused with D′D3, it was found that when it was expressed in a single chain form, the expression level was similar to that of scFVIII-B3 the fusion of D′D3. However, it was found that when expressed as a dimer, the expression level was 0.1 IU/mL, which was 10 times or more lower than that of pre-existing scFVIII-B3, and the measured results are shown in Table 3.

### Example 3-2. Expression Pattern Analysis

[0162] After the chimeric FVIII constructed in the present invention was purified according to Example 4, the expression pattern of the purified sample was confirmed by Western blot analysis.

[0163] The culture solution and LDS sample buffer were mixed at a ratio of 3:1, and 30 μL of the mixed sample was loaded on 4-12% bis-tris (BT) gel and run for about 1 hour at 150 volts. The gel which completed the running was transferred to a nitrocellulose (NC) membrane, and allowed to stand in a blocking buffer (Thermo Scientific) for 1 hour. The primary antibody recognizing the heavy chain (GMA-012, Green Mountain Antibodies), light chain (ab41188, Abcam) and D′D3 (96340, Abcam) of the Factor VIII was prepared by dilution in a TBST buffer, and was reacted for 1 hour with a NC membrane which completed the blocking. The resultant was washed for 3 times at 5 minutes intervals using a TBST buffer. The secondary antibody (Goat anti-mouse IgG-HRP conjugate) was prepared by dilution with a TBST buffer, and was reacted with a NC membrane for 10 minutes. The resultant was washed for 5 times at 5 minutes intervals using a TBST buffer. The ECL Prime Western Blotting Detection Reagent was scattered thereto to color develop the NC membrane, and the membrane was exposed to Hyperfilm ECL (GE healthcare) and developed in a dark room.

[0164] As a result, it was confirmed that all of the chimeric FVIIIs expressed in a single chain were expressed in a form designed in the present invention, and the expression pattern did not change depending on the linker length (FIG. 5).

### Example 4. Chimeric FVIII Production

[0165] The production process of chimeric FVIII largely consists of five steps. Purification was carried out using the culture solution used for the culture in Example 2.

[0166] In the first step, the process of separating and purifying chimeric FVIII from the culture medium was conducted using the VIIISelect resin developed by GE Inc. for purification. The VIIISelect resin was packed into a column and the column was washed with 2% citric acid. It was equilibrated by flowing an equilibrium buffer (20 mM Histidine, 5 mM CaCl₂), 1 M NaCl, 0.02% Tween® 80, pH 7.0). 5 M NaCl buffer was added to the culture solution to a final concentration of 1 M NaCl, which was then titrated to pH 7.0, and loaded onto the column. After loading the culture solution, it was equilibrated by flowing the equilibrium buffer until the UV fell to the baseline. Chimeric FVIII was eluted by flowing an elution buffer (20 mM Histidine, 5 mMCaCl 2, 0.9 M Arginine, 45% propylene glycol, 0.02% Tween® 80, pH 6.5).

[0167] In the second step, a process of removing the propylene glycol mixed in the eluent in the first step and removing some mixed impurities was conducted using Q fast flow resin from GE Inc. After the Q fast flow resin was packed into a column, the column was washed by flowing a washing buffer (0.5 M NaOH, 1 M NaCl). It was equilibrated by flowing an equilibrium buffer (20 mM Histidine, 5 mM CaCl₂), 0.02% Tween® 80, pH 7.0). The eluent in the VIIISelect process was diluted 10-fold by an equilibration buffer, titrated to pH 7.0, and loaded onto the column. After the loading, it was equilibrated by flowing an equilibrium buffer until the UV fell to the baseline. Chimeric FVIII was eluted by flowing an elution buffer (20 mM Histidine, 5 mM CaCl₂), 500 mM NaCl, 0.02% Tween®80, pH 7.0).

[0168] In the third step, a process of conjugating the purified chimera FVIII to PEG was conducted. TCEP was added to the purified chimeric FVIII solution to a final concentration of 0.1 mM, and allowed to stand at 4° C. for 1 hour to reduce the inserted cysteine. Residual TCEP was removed using a PD-10 column (GE healthcare) equilibrated with PEGylated buffer (20 mM Histidine, 5 mM CaCl₂), 200 mM NaCl, 0.02% Tween® 80, pH 7.0). It was allowed to stand at 4° C. for 2 hours to oxidize the disulfide bond of the reduced chimera FVIII itself. PEG conjugation was conducted by adding PEG solution (50 mg/mL) dissolved in DMSO at a ratio of PEG to protein of 1:20, which was then allowed to stand at 4° C. for 12-16 hours.

[0169] In the fourth step, a process of removing chimera FVIII without PEG and Chimera FVIII with two or more PEGs, which are impurities formed during the PEGylation process, was conducted using Superdex 200 resin of GE Inc. A pre-packed superdex 200 column was equilibrated by flowing an equilibrated buffer (20 mM Histidine, 5 mM CaCl₂), 200 mM NaCl, 0.02% Tween® 80, pH 7.0). The PEGylation process sample was loaded onto the column using a sample loop. After loading, an equilibrium buffer was flowed to collect peaks, and analysis by SDS-PAGE was conducted for pooling of appropriate fractions.

[0170] In the fifth step, a process of concentrating the PEGylated chimeric FVIII pooled in the fourth step was conducted. For the process, the FVIII was concentrated to a concentration of 25 IU/mL using Amicon 30 kDa manufactured by Millipore Inc.

[0171] SDS-PAGE was conducted for the intermediate sample of the process and the final sample to analyze the degrees of purification and PEGylation (FIGS. 4 and 6). In the case of scFVIII/D′D3, it was confirmed that the purification patterns of the samples with different linker lengths were almost similar. it was found that most of the HCP was removed in the VIIISelect process, the first process, and only the scFVIII/D′D3 in the form of a monomer was purified in the Q FF process, the second process. Thereafter, the PEGylation process was carried out and then the samples were purified to confirm that only PEG-scFVIII/D′D3 was purified.

### Example 5. Confirmation of Specific Activity of Chimeric FVIII Substance

[0172] In order to confirm the specific activity of chimeric FVIII, the chimeric FVIII activity was measured by a chromogenic method, and the amount of chimeric FVIII protein was measured by the BCA method using BSA as a standard. The specific activity was measured by dividing the results of the activity measurement by the amount of protein. The results are shown in Table 4.

TABLE 4
Specific activity of chimeric FVIII

| | scFVIII/ | scFVIII/ | scFVIII/ |
|---|---|---|---|
| Samples | D′D3-60 | D′D3-90 | D′D3-120 |
| CS (IU/ml) | 941.6 | 812.7 | 811.2 |
| BCA (μg/ml) | 101.2 | 95.9 | 86.6 |
| Specific activity (IU/mg) | 9304.3 | 8474.5 | 9367.2 |

[0173] In the case of scFVIII/D′D3, it was confirmed that the specific activity values were not significantly different even when the linker length was changed, and the specific activity measured in this example was similar to those of other recombinant FVIIIs.

### Example 6. Measurement of Binding Affinity of Chimeric FVIII to LRP or vWF

[0174] The binding affinity of the chimeric FVIII to LRP or vWF was measured by an ELISA method. The vWF (HCVWF-0191, Haemtech, 200 μg/mL) or LRP (#04-03, Biomac, 260 μg/mL) was coated onto a 96 well plate in an amount of 100 μL per well, and allowed to stand for 2 hours at room temperature. After 2 hours of incubation, the wells were washed with a washing buffer produced by adding 0.1% Tween® 20 to PBS. Blocking was conducted by adding 200 μL of a blocking buffer produced by adding 1% BSA to PBS to each well and then incubating for 1 hour at room temperature. After the incubation for 1 hour, the wells were washed with a washing buffer produced by adding 0.1% Tween® 20 to PBS. FVIII sample was diluted to an appropriate concentration using a blocking buffer, loaded onto the wells in an amount of 100 μL per well, and incubated for 1 hour at room temperature. The wells were washed with a washing buffer produced by adding 0.1% Tween® 20 to PBS. Anti-Factor VIII biotin (SAF8C-APBIO, Affinity Biologicals, 100 μg/mL) was diluted to 1/2000 using a blocking buffer and was loaded onto the wells in an amount of 100 μL per well, and allowed to stand for 1 hour at room temperature. The wells were washed with a washing buffer produced by adding 0.1% Tween® 20 to PBS.

[0175] Streptavidin-HRP (S2438, Sigma-Aldrich) was diluted to 1/3000 using a blocking buffer and loaded the wells in an amount of 100 μL per well, and incubated for 45 minutes at room temperature. The wells were washed with a washing buffer produced by adding 0.1% Tween® 20 to PBS. After treating the wells with TMB substrate (52-00-03, KPL) in an amount of 100 μL per well and incubated for 10 minutes. A stop solution (1 N sulfuric acid) was put into the wells in an amount of 100 μL per well to stop the reactions, and the absorbance at 490 nm was measured.

[0176] As a result of the experiment, it was confirmed that the binding of chimeric FVIII to LRP or vWF was significantly reduced compared to ADVATE®. In addition, it was confirmed that, when chimeric FVIII was PEGylated, its binding to LRP or vWF was further reduced (FIGS. 7 and 8).

### Example 7. Animal PK Test: PEG-scFVIII/D′D3-120

[0177] In order to measure the half-life of the PEGylated chimeric FVIII in the body, a PK test using a hemophilia A mouse model (HA mice) was carried out. 8 weeks old mice (20±2 g) were used as the HA mice, and they were subjected to weight measurement before administration, and then grouped (n=3/time point). Then, Advate®, a control, and PEGylated chimeric FVIII (PEG-scFVIII/D′D3-120 was used in this example) were administered intravenously once at a dose of 125 IU/kg. PK blood samples were collected by sampling 200 μl of blood at 0, 0.083, 2, 6, 9, 16, 22, and 30 hours after administration in the Advate® administration group and at 0, 0.083, 2, 6, 16, 30, 40, 48, 64, and 72 hours after administration in the PEG-scFVIII/D′D3-120 administration group Immediately after sampling, the samples were mixed with an anticoagulant (sodium citrate 3.2% buffer) at a volume ratio of 1:9 and centrifuged to separate plasma. The titers of Advate® and PEG-scFVIII/D′D3-120 were measured using the Chromogenic method and pharmacokinetic parameters were calculated using the non-compartmental (NCA) model of WinNonLin software (version 6.4). As the PK assay results (FIG. 9), the measured half-life of Advate® was about 7.86 hours and the half-life of PEG-scFVIII/D′D3-120 was 26.12 hours, which was 3.3 times longer than Advate®. The mean residence time (MRT) of PEG-scFVIII/D′D3-120 was also increased by 3.6-fold as compared to Advate®. In addition, the elimination rate (CL) of PEG-scFVIII/D′D3-120 was decreased by about 2-fold as compared to Advate®, and the area under the curve (AUC) was increased by about 2-fold.

TABLE 5
Pharmacokinetic parameters of PEGylated chimeric FVIII

| | T_{1/2 terminal} | MRT_{INF} | AUC_{INF} | CL | V_{SS} |
|---|---|---|---|---|---|
| PK parameter | (hr) | (hr) | (hr · IU/ml) | (ml/hr/kg) | (ml/kg) |
| Advate ® | 7.86 | 9.43 | 18.55 | 6.74 | 63.51 |
| PEG-scFVIII/ | 26.12 | 33.68 | 38.46 | 3.25 | 109.83 |
| D′D3-120 | | | | | |

[0178] Since the concentration of FVIII in the blood is kept at 1% or 3% or more in an actual preventive therapy, the time point when the FVIII concentration in the blood drops at or below 1% or 3% can be delayed by using a long half-life sustained FVIII, which leads to a reduction in the frequency of administrations. In the case of the sustained FVIII developed so far, the half-life in the HA mice was increased by 2-fold or lower as compared to the control. This suggests that the half-life of FVIII did not become longer than that of vWF because FVIII circulates in the blood in a state of strong non-covalent bond with vWF as mentioned above. It is contemplated that the half-life of the chimeric FVIII developed in the present invention increased by 2-fold or more as compared, which is a level sustained FVIII developed so far could not achieve, since the chimeric FVIII developed in the present invention inhibits binding with vWF in the blood, and also prevents the clearance of the chimeric FVIII by LRP. This is considered to be a very meaningful result.

### Example 8. Animal PK Test: scFVIII/D′D3-120 Conjugated with Various Sizes of PEG

[0179] Similar to Example 7, a PK test using a Hemophilia A-type mouse model (HA mice) was carried out. 8 weeks old mice (20±2 g) were used as the HA mice, and they were subjected to weight measurement before administration, and then grouped (n=3/time point). Then, Advate®, a control, and PEGylated chimeric FVIII were administered intravenously once at a dose of 125 IU/kg. In this example, the PK test was conducted using the scFVIII/D′D3-120 conjugated with PEG of different sizes. PK blood samples were collected by sampling 200 μl of blood at 0, 0.083, 2, 6, 9, 16, 22 and 30 hours after administration in the Advate® administration group (control) and at 0, 0.083, 2, 6, 16, 30, 40, 48, 64, 72, and 96 hours after administration in the test group. Immediately after sampling, the samples were mixed with an anticoagulant (sodium citrate 3.2% buffer) at a volume ratio of 1:9 and centrifuged to separate plasma. The titers of Advate® and chimeric FVIII were measured using the Chromogenic method and pharmacokinetic parameters were calculated using the non-compartmental (NCA) model of WinNonLin software (version 6.4).

[0180] As the PK assay results, the measured half-lives of Advate®, 40 kDa PEG-scFVIII/D′D3-120, and 60 kDa PEG-scFVIII/D′D3-120 were about 7.88 hours, about 20.93 hours, and about 28.09 hours, respectively. The pharmacokinetic profiles and pharmacokinetic parameters are shown in FIG. 10 and Table 6.

TABLE 6
Pharmacokinetic parameters of PEGylated chimeric FVIII

| | T_{1/2 terminal} | MRT_{INF} | AUC_{INF} | CL | V_{SS} |
|---|---|---|---|---|---|
| PK parameter | (hr) | (hr) | (hr · IU/ml) | (ml/hr/kg) | (ml/kg) |
| Advate ® | 7.88 | 9.68 | 16.16 | 7.76 | 74.86 |
| 40 kDa | 20.93 | 28.17 | 35.78 | 3.50 | 98.44 |
| PEG-scFVIII/ | | | | | |
| D′D3-120 | | | | | |
| 60 kDa | 28.09 | 35.03 | 39.59 | 3.17 | 109.95 |
| PEG-scFVIII/ | | | | | |
| D′D3-120 | | | | | |

### Example 9. Animal PK Test: PEG-scFVIII/D′D3-60 and Conjugation of PEG to scFVIII/D′D3-120 Fused with Fc

[0181] A PK test using a hemophilia A mouse model (HA mice) was carried out. 8 weeks old mice (20±2 g) were used as the HA mice, and they were subjected to weight measurement before administration, and then grouped (n=3/time point). Then, Advate®, a control, and PEGylated chimeric FVIII were administered intravenously once at a dose of 125 IU/kg. In this example, the PK test was conducted using PEG-scFVIII/D′D3-60 and a substance obtained by conjugating PEG to scFVIII/D′D3-120 fused with Fc. The blood samples were collected by sampling 200 μl of blood at 0, 0.083, 2, 6, 9, 16, 22 and 30 hours after administration in the Advate® administration group (control) and at 0, 0.083, 2, 6, 16, 30, 40, 48, 64, 72, and 96 hours after administration in the test group. Immediately after sampling, the samples were mixed with an anticoagulant (sodium citrate 3.2% buffer) at a volume ratio of 1:9 and centrifuged to separate plasma. The titers of Advate® and chimeric FVIII were measured using the Chromogenic method and pharmacokinetic parameters were calculated using the non-compartmental (NCA) model of WinNonLin software (version 6.4).

[0182] As the PK assay results, the measured half-lives of Advate®, PEG-scFVIII/D′D3-60, and PEG-scFVIII/D′D3/Fc-120, Fc were about 7.08 hours, about 16.53 hours, and about 18.89 hours, respectively. Pharmacokinetic profiles and pharmacokinetic parameters are shown in FIG. 11 and Table 7.

TABLE 7
Pharmacokinetic parameters of PEGylated chimeric FVIII

| | T_{1/2 terminal} | MRT_{INF} | AUC_{INF} | CL | V_{SS} |
|---|---|---|---|---|---|
| PK parameter | (hr) | (hr) | (hr · IU/ml) | (ml/hr/kg) | (ml/kg) |
| Advate ® | 7.08 | 9.38 | 15.84 | 7.95 | 74.56 |
| PEG-scFVIII/ | 16.53 | 22.93 | 29.16 | 4.30 | 98.93 |
| D′D3-60 | | | | | |
| PEG-scFVIII/ | 18.89 | 26.23 | 26.68 | 4.70 | 123.05 |
| D′D3/Fc-120, | | | | | |
| Fc | | | | | |

### Example 10. Animal PK Test: PEG-scFVIII/D′D3-300 and Conjugating PEG to scFVIII/D′D3-120 in which FVIII was Fused with D′D3 in a Dimeric Form at the C-Terminal

[0183] A PK test using a hemophilia A mouse model (HA mice) was carried out. 8 weeks old mice (20±2 g) were used as the HA mice, and they were subjected to weight measurement before administration, and then grouped (n=3/time point). Then, Advate®, a control, and PEGylated chimeric FVIII were administered intravenously once at a dose of 125 IU/kg. In this example, the PK test was conducted using PEG-scFVIII/D′D3-300 and a substance obtained by conjugating PEG to scFVIII/D′D3-120 in which FVIII was fused with D′D3 in a dimeric form at the c-terminal. PK blood samples were collected by sampling 200 μl of blood at 0, 0.083, 2, 6, 9, 16, 22 and 30 hours after administration in the Advate® administration group (control) and at 0, 0.083, 2, 6, 16, 30, 40, 48, 64, 72, and 96 hours after administration in the test group. Immediately after sampling, the samples were mixed with an anticoagulant (sodium citrate 3.2% buffer) at a volume ratio of 1:9 and centrifuged to separate plasma. The titers of Advate® and chimeric FVIII were measured using the Chromogenic method and pharmacokinetic parameters were calculated using the non-compartmental (NCA) model of WinNonLin software (version 6.4).

[0184] As the PK assay results, the measured half-lives of Advate®, PEG-scFVIII/D′D3-300, and PEG-scFVIII/D′D3/D′D3-120 were about 9.02 hours, about 15.76 hours, and about 18.00 hours, respectively. Pharmacokinetic profiles and pharmacokinetic parameters are shown in FIG. 12 and Table 8.

TABLE 8
Pharmacokinetic parameters of PEGylated chimeric FVIII

| | T_{1/2 terminal} | MRT_{INF} | AUC_{INF} | CL | V_{SS} |
|---|---|---|---|---|---|
| PK parameter | (hr) | (hr) | (hr · IU/ml) | (ml/hr/kg) | (ml/kg) |
| Advate ® | 9.02 | 10.52 | 18.62 | 6.77 | 71.02 |
| PEG-scFVIII/ | 15.76 | 21.84 | 40.10 | 3.12 | 68.22 |
| D′D3-300 | | | | | |
| PEG-scFVIII/ | 18.00 | 22.69 | 39.57 | 3.16 | 71.58 |
| D′D3/D′D3-120 | | | | | |

### Example 11. Animal PK Test: PEG-scFVIII/D′D3-60, PEG-scFVIII/D′D3-120, and PEG-scFVIII/D′D3-300

[0185] A PK test using a hemophilia A mouse model (HA mice) was carried out. 8 weeks old mice (20±2 g) were used as the HA mice, and they were subjected to weight measurement before administration, and then grouped (n=3/time point). Then, Advate®, a control, and PEGylated chimeric FVIII were administered intravenously once at a dose of 125 IU/kg. In this example, the PK test was conducted using PEG-scFVIII/D′D3-60, PEG-scFVIII/D′D3-120 and PEG-scFVIII/D′D3-300. The blood samples were collected by sampling 200 μl of blood at 0, 0.083, 2, 6, 9, 16, 22 and 30 hours after administration in the Advate® administration group (control) and at 0, 0.083, 2, 6, 16, 30, 40, 48, 64, 72, and 96 hours after administration in the test group. Immediately after sampling, the samples were mixed with an anticoagulant (sodium citrate 3.2% buffer) at a volume ratio of 1:9 and centrifuged to separate plasma. The titers of Advate® and chimeric FVIII were measured using the Chromogenic method and pharmacokinetic parameters were calculated using the non-compartmental (NCA) model of WinNonLin software (version 6.4).

[0186] As the PK assay results, the measured half-life of Advate® was about 6.99 hours, and those of PEG-scFVIII/D′D3-60, PEG-scFVIII/D′D3-120 and PEG-scFVIII/D′D3-300 were about 20.07, 24.48, and 17.13 hours, respectively. Pharmacokinetic profiles and pharmacokinetic parameters are shown in FIG. 13 and Table 9.

TABLE 9
Pharmacokinetic parameters of PEGylated chimeric FVIII

| | T_{1/2 terminal} | MRT_{INF} | AUC_{INF} | CL | V_{SS} |
|---|---|---|---|---|---|
| PK parameter | (hr) | (hr) | (hr · IU/ml) | (ml/hr/kg) | (ml/kg) |
| Advate ® | 6.99 | 9.03 | 15.38 | 8.21 | 73.36 |
| PEG-scFVIII/ | 20.07 | 28.07 | 33.82 | 3.70 | 103.59 |
| D′D3-60 | | | | | |
| PEG-scFVIII/ | 24.48 | 29.00 | 33.68 | 3.79 | 105.58 |
| D′D3-120 | | | | | |
| PEG-scFVIII/ | 17.13 | 24.26 | 31.22 | 4.02 | 97.47 |
| D′D3-300 | | | | | |

### Example 12. Animal PK Test: PEG-scFVIII/D′D3-120, PEG-scFVIII/D′D3-120-TH1, and PEG-scFVIII/D′D3-120-TH2

[0187] A PK test using a hemophilia A mouse model (HA mice) was carried out. 8 weeks old mice (20±2 g) were used as the HA mice, and they were subjected to weight measurement before administration, and then grouped (n=3/time point). Then, Advate®, a control, and PEGylated chimeric FVIII were administered intravenously once at a dose of 125 IU/kg. In this example, the PK test was conducted using PEG-scFVIII/D′D3-120, PEG-scFVIII/D′D3-120-TH1, and PEG-scFVIII/D′3-120-TH2. The blood samples were collected by sampling 200 μl of blood at 0, 0.083, 2, 6, 9, 16, 22 and 30 hours after administration in the Advate® administration group (control) and at 0, 0.083, 2, 6, 16, 30, 40, 48, 64, 72, and 96 hours after administration in the test group. Immediately after sampling, the samples were mixed with an anticoagulant (sodium citrate 3.2% buffer) at a volume ratio of 1:9 and centrifuged to separate plasma. The titers of Advate® and chimeric FVIII were measured using the Chromogenic method and pharmacokinetic parameters were calculated using the non-compartmental (NCA) model of WinNonLin software (version 6.4).

[0188] As the PK assay results, the measured half-life of Advate® was about 6.26 hours, and those of PEG-scFVIII/D′D3-120, PEG-scFVIII/D′D3-120-TH1, and PEG-scFVIII/D′3-120-TH2 were about 21.28, 24.19, and 25.28 hours, respectively. Pharmacokinetic profiles and pharmacokinetic parameters are shown in FIG. 14 and Table 10.

TABLE 10
Pharmacokinetic parameters of PEGylated chimeric FVIII

| | T_{1/2 terminal} | MRT_{INF} | AUC_{INF} | CL | V_{SS} |
|---|---|---|---|---|---|
| PK parameter | (hr) | (hr) | (hr · IU/ml) | (ml/hr/kg) | (ml/kg) |
| Advate ® | 6.26 | 8.02 | 13.06 | 9.58 | 76.73 |
| PEG-scFVIII/ | 21.28 | 26.50 | 29.22 | 4.29 | 112.48 |
| D′D3-120 | | | | | |
| PEG-scFVIII/ | 24.19 | 29.42 | 28.92 | 4.33 | 127.26 |
| D′D3-120-TH1 | | | | | |
| PEG-scFVIII/ | 25.28 | 28.94 | 26.90 | 4.65 | 134.13 |
| D′D3-120-TH2 | | | | | |

### Example 13. Animal PK Test: scFVIII/D′D3-120-TH1 Conjugated with PEG of Various Sizes and Forms

[0189] A PK test using a hemophilia A mouse model (HA mice) was carried out. 8 weeks old mice (20±2 g) were used as the HA mice, and they were subjected to weight measurement before administration, and then grouped (n=3/time point). Then, Advate®, a control, and PEGylated chimeric FVIII were administered intravenously once at a dose of 125 IU/kg. In this example, the PK test was conducted using substances obtained by conjugating various PEGs to scFVIII/D′D3-120-TH1. The blood samples were collected by sampling 200 μl of blood at 0, 0.083, 2, 6, 9, 16, 22 and 30 hours after administration in the Advate® administration group (control) and at 0, 0.083, 2, 6, 16, 30, 40, 48, 64, 72, and 96 hours after administration in the test group. Immediately after sampling, the samples were mixed with an anticoagulant (sodium citrate 3.2% buffer) at a volume ratio of 1:9 and centrifuged to separate plasma. The titers of Advate® and chimeric FVIII were measured using the Chromogenic method and pharmacokinetic parameters were calculated using the non-compartmental (NCA) model of WinNonLin software (version 6.4).

[0190] As the PK assay results, the measured half-life of Advate® was about 7.66 hours, and those of 20 kDa linear PEG-scFVIII/D′D3-120-TH1, 20 kDa branch PEG-scFVIII/D′D3-120-TH1, 40 kDa branch PEG-scFVIII/D′D3-120-TH1 were about 22.98, 16.10, and 27.33 hours, respectively. Pharmacokinetic profiles and pharmacokinetic parameters are shown in FIG. 15 and Table 11.

TABLE 11
Pharmacokinetic parameters of PEGylated chimeric FVIII

| | T_{1/2 terminal} | MRT_{INF} | AUC_{INF} | CL | V_{SS} |
|---|---|---|---|---|---|
| PK parameter | (hr) | (hr) | (hr · IU/ml) | (ml/hr/kg) | (ml/kg) |
| Advate ® | 7.66 | 9.85 | 10.93 | 11.77 | 103.63 |
| 20 kDa L | 22.64 | 30.66 | 52.91 | 2.38 | 71.29 |
| PEG-scFVIII/ | | | | | |
| D′D3-120-TH1 | | | | | |
| 20 kDa B | 15.87 | 24.42 | 48.78 | 2.59 | — |
| PEG-scFVIII/ | | | | | |
| D′D3-120-TH1 | | | | | |
| 40 kDa B | 28.12 | 38.71 | 60.53 | 2.09 | 77.55 |
| PEG-scFVIII/ | | | | | |
| D′D3-120-TH1 | | | | | |

### Example 14. Thrombin Generation Assay

[0191] To examine the thrombin generation profile of PEGylated chimeric FVIII, a thrombin generation assay was conducted. Fluoroskan Ascent™ FL microplate fluorometer and luminometer (5210460, Thermofisher) apparatuses were pre-warmed to 37° C. and the machine line was washed with 37° C. pre-warmed DW. FVIII deficient plasma (0TXW17, Siemens), Calibrator (TS20.00, Thrombinoscope), and PPP-low-reagent (TS31.00, Thrombinoscope) were warmed by leaving them at room temperature for 15 minutes or longer, and then reconstituted by 1 mL of 37° C. pre-warmed DW. 20 μL of the Calibrator or PPP-low-reagent was put into a 96-well plate, which was put into the Fluoroskan apparatus prepared previously to warm it to 37° C. The sample was diluted to an appropriate concentration using the FVIII deficient plasma prepared previously. Fluo-buffer in FluCa-Kit (TS50.00, Thrombinoscope) was prepared by warming to 37° C. 80 μL each of the prepared samples were added to the plate in the Fluoroskan instrument, and 40 μL of a Fluo-substrate was placed in 1 vial of a Fluo-buffer warmed at 37° C. After putting the prepared Flu-Ca in the machine, pre-programmed software was run to dispense Flu-Ca at 20 μL per well, and thrombin generation was proceeded.

[0192] The thrombin generation assay showed that the thrombin generation profile was significantly lower in FVIII deficient plasma whereas the thrombin generation profile in chimeric FVIII was gradually increased in a concentration dependent manner. The thrombin generation profile of chimeric FVIII 1 IU/mL was similar to the thrombin generation profile of normal plasma (FIG. 16).

### Example 15. Animal Acute Efficacy Test

[0193] To examine the efficacy of chimeric FVIII, the acute efficacy test was conducted using the tail clip model of hemophilia A type mice (HA mice). For wild type mice (WT), male C57BL/6 mice weighing 19-25 g provided by Orient Bio were used. For HA mice, male mice weighing 19-25 g provided by Green Cross were selected and used. On the day of the test, after filling saline up to 14 mL in 15 mL conical tubes (1/mouse), the tubes were kept in a heated water bath to maintain the temperature of the saline at 37° C., and the body weights of the mice before administration were measured. Pentobarbital sodium was administered IP at a dose of 60 mg/kg to anesthetize them, and then 0.9% physiological saline, a negative control, or Advate® and PEGylated chimeric FVIII, positive controls, were administered into the jugular vein at a dose of 100 IU/kg in a single dose at a volume of 5 mL/kg. After 5 minutes, HA mice tails were cut at the 4 mm point from the tail end, and the tails were placed in a saline buffer for 30 minutes to collect blood. The blood samples collected for 30 minutes were centrifuged at 1,500 g for 5 minutes to remove the supernatant, and then 10 mL of tertiary distilled water was added to the conical tube using a 10 mL pipet, and the blood was completely hemolyzed using a vortex. To measure blood loss, the hemolyzed samples were analyzed using a hemoglobin assay kit (MAK115-1KT, Sigma-Aldrich).

[0194] The concentration of hemoglobin was about 100 nM in wild type mice (WT), and the concentration of hemoglobin was about 1,000 nM in the negative control, HA mice (KO). It was found that Advate® and PEGylated chimeric FVIII showed the hemoglobin concentrations of about 140-450 nM, which are about 55% lower than those of the negative control. It was found that there was no statistically significant difference between Advate® and PEGylated chimeric FVIII (FIG. 17).

### Example 16. Animal PK Test: Conjugation of PEGs of Various Sizes and Forms to scFVIII/D′D3-120-TH1 Expressed in CHO Cells

[0195] PK test using a hemophilia A mouse model (HA mice) was carried out. 8 weeks old mice (20±2 g) were used as the HA mice, and they were subjected to weight measurement before administration, and then grouped (n=3/time point). Then, Advate®, a control, and PEGylated chimeric FVIII were administered intravenously once at a dose of 125 IU/kg. In this example, the PK test was conducted using substances obtained by conjugating various PEGs to scFVIII/D′D3-120-TH1 expressed in CHO cells. The blood samples were collected by sampling 200 μl of blood at 0, 0.083, 2, 6, 9, 16, 22, and 30 hours after administration in the Advate® administration group (control) and at 0, 0.083, 2, 6, 16, 30, 40, 48, 64, 72, and 96 hours after administration in the test group. Immediately after sampling, the samples were mixed with an anticoagulant (sodium citrate 3.2% buffer) at a volume ratio of 1:9 and centrifuged to separate plasma. The titers of Advate® and chimeric FVIII were measured using the Chromogenic method and pharmacokinetic parameters were calculated using the non-compartmental (NCA) model of WinNonLin software (version 6.4).

[0196] As the PK assay results, the measured half-life of Advate® was about 8.22 hours, and those of 20 kDa linear PEG-scFVIII/D′D3-120-TH1 and 40 kDa linear PEG-scFVIII/D′3-120-TH1 were about 25.01, and 26.88 hours, respectively. Pharmacokinetic profiles and pharmacokinetic parameters are shown in FIG. 18 and Table 12.

TABLE 12
Pharmacokinetic parameter of PEGylated chimeric FVIII

| | T_{1/2 terminal} | MRT_{INF} | AUC_{INF} | CL | V_{SS} |
|---|---|---|---|---|---|
| PK parameter | (hr) | (hr) | (hr · IU/ml) | (ml/hr/kg) | (ml/kg) |
| Advate ® | 8.22 | 10.89 | 13.61 | 9.20 | 103.63 |
| 20 kDa L | 20.12 | 28.22 | 36.73 | 3.40 | 97.98 |
| PEG-scFVIII/ | | | | | |
| D′D3-120-TH1 | | | | | |
| 40 kDa L | 26.30 | 36.31 | 48.87 | 2.57 | 94.85 |
| PEG-scFVIII/ | | | | | |
| D′D3-120-TH1 | | | | | |

[0197] While the present invention has been described in connection with exemplary embodiments, it is to be understood that the disclosure is not limited to the disclosed embodiments, but is intended to cover various modifications and improvements using the basic concept of the present invention.

[0198] All the technical terms that were used in the present invention, have the same meanings that are understood by a skilled person in this art, unless otherwise specified. The contents of all the publications disclosed in the present description as a reference document are incorporated in the present invention.

1. A chimeric protein comprising:
a human Factor VIII (FVIII) comprising a light chain and a heavy chain, the human FVIII comprising a B domain which is totally deleted in its entire length or partially deleted; and
at least one vWF D′D3 domain,
wherein the light chain and heavy chain are expressed as one polypeptide or two polypeptides, wherein:
if the light chain and heavy chain are expressed as one polypeptide, the chimeric protein comprises a linker which connects the FVIII and the vWF D′D3 domain and has an enzyme cleavage site located therebetween, wherein the FVIII and the vWF D′D3 domain are located in the N-terminal direction and the C-terminal direction or in the C-terminal direction and the N-terminal direction, respectively, based on the linker; and
if the light chain and heavy chain are expressed as two polypeptides, the vWF D′D3 domain is linked to the C-terminal of the B domain contained in the heavy chain.

2. The chimeric protein of claim 1, wherein the partially deleted B domain has at least five amino acid deletions in each of the N-terminal direction and/or C-terminal direction based on the 1648 and 1649 residue positions of SEQ ID NO: 01, the deletion including the residues; or
the B domain is partially deleted such that it includes 4 to 6 glycation sites.

3. The chimeric protein of claim 1, wherein the partially deleted B domain is represented by a sequence of amino acid residues 741 to 902 and 1654 to 1689, or amino acid residues 741 to 936, based on the sequence of SEQ ID NO: 01.

4. The chimeric protein of claim 1, which comprises two vWF D′D3 domains, wherein the two vWF D′D3 domains are linked by a linker with or without an enzyme cleavage site and/or form a dimer by a covalent bond there.

5. The chimeric protein of claim 1, wherein the chimeric protein further comprises at least one Fc, wherein the Fc is linked to the vWF D′D3 domain and/or the FVIII by a linker with or without an enzyme cleavage site.

6. The chimeric protein of claim 5, wherein the chimeric protein comprises two Fcs, wherein the two Fcs are linked by a linker with or without an enzyme cleavage site and/or form a dimer by a covalent bond therebetween.

7. The chimeric protein of claim 1, wherein:
the enzyme cleavage site is a sequence which can be cleaved by thrombin, FVIIa, FXa or FXIa; and
the other sequence in the linker having the enzyme cleavage site is represented by the amino acid sequence of [G₄S]ₙ, wherein n is 0, or an integer between 1 and 100.

8. The chimeric protein of claim 7, wherein n is 4, 6, 8, 10, 16, 21, 22 or 58.

9. The chimeric protein of claim 7, the amino acid sequence which can be cleaved by the thrombin is DFLAEGGGVR (SEQ ID NO: 36), TTKIKPR (SEQ ID NO: 37), or LVPRGS (SEQ ID NO: 38); the amino acid sequence which can be cleaved by the FVIIa is ASKPQGRIVGG (SEQ ID NO:39); the amino acid sequence which can be cleaved by FXa is IDGR (SEQ ID NO: 40) or IEGR (SEQ ID NO: 41); the sequence which can be cleaved by FXIa is SKLTRAETVF (SEQ ID NO: 42).

10. The chimeric protein of claim 1, wherein the two polypeptides are first and second polypeptides, wherein:
the first polypeptide comprises the heavy chain and all or a portion of the B domain of the FVIII, and the second polypeptide comprises the light chain or a portion of the B domain of the FVIII; and
the vWF D′D3 domain is located in the N-terminal or C-terminal direction of the first polypeptide, or in the N-terminal or C-terminal direction of the second polypeptide; and
optionally, the chimeric protein further comprises at least one Fc, wherein the Fc is linked to the vWF D′D3 domain and/or the second polypeptide.

11. The chimeric protein of claim 10, wherein the first polypeptide comprises the heavy chain and a portion of the B domain of the FVIII, and the portion of the B domain includes an amino acid sequence of amino acid residues 741 to 936 based on SEQ ID NO: 01.

12. The chimeric protein of claim 10, wherein the chimeric protein comprises two or more vWF D′D3 domains, wherein the two or more vWF D′D3 domains are linked by a linker with or without an enzyme cleavage site, and/or the vWF D′D3 domains form a complex by a covalent bond between the domains.

13. The chimeric protein of claim 10, wherein the Fc or the vWF D′D3 domain is linked by a linker with or without an enzyme cleavage site.

14. The chimeric protein of claim 1, wherein the chimeric protein which is expressed as one polypeptide has the amino acid sequence represented by SEQ ID NO: 6, 7, 8, 9, 10, 11, 12, 13, 14, 15, 16, 17, 18, 19, 21, or 25, or an amino acid sequence that has at least 90% homology to said amino acid sequence.

15. The chimeric protein of claim 10, wherein the chimeric protein which is expressed as two polypeptides has the amino acid sequences represented by SEQ ID NOs: 4 and 5 (heavy chain and light chain, respectively), SEQ ID NOs: 23 and 24 (heavy chain and light chain, respectively), SEQ ID NOs: 26 and 27 (heavy chain and light chain, respectively), SEQ ID NOs: 28 and 29 (heavy chain and light chain, respectively), SEQ ID NOs: 30 and 31 (heavy chain and light chain, respectively), SEQ ID NOs: 32, and 33 (heavy chain and light chain, respectively), or SEQ ID NO: 34 and 35 (heavy chain and light chain, respectively), or the amino acid sequences that have at least 90% homology to the amino acid sequences.

16. The chimeric protein of claim 1, wherein the FVIII is conjugated to a hydrophilic polymer at one or more amino acid residues of the A and/or B domain fragments, and the conjugation position is at least one selected from the group consisting of amino acid residues 754, 781, 782, 788, 789, 825, and 897 based on the sequence of SEQ ID NO: 01 in the B domain, and/or at least one selected from the group consisting of amino acid residues 491, 495, 498 and 1806 based on the sequence of SEQ ID NO: 01 in the A domain, and the one or more residues at the conjugation position are substituted with cysteine for conjugation with the hydrophilic polymer.

17. The chimeric protein of claim 16, wherein the hydrophilic polymer is polyethylene glycol (PEG), polyethylene oxide, dextran, and the PEG is linked at the conjugation position via acryloyl, sulfone or maleimide.

18. The chimeric protein of claim 16, wherein the FVIII is conjugated to a hydrophilic polymer at one or more amino acid residues of the B domain fragment, and the conjugation position is amino acid residue 782.

19. The chimeric protein of claim 17, wherein the PEG has an average molecular weight of 20 kDa or more.

20. The chimeric protein of claim 19, wherein the PEG has an average molecular weight of 40 kDa or 60 kDa.

21. The chimeric protein of claim 1, wherein the protein has at least a half-life which is extended by at least 2-fold as compared to a wild-type FVIII protein.

22. A nucleic acid molecule encoding the chimeric protein of claim 14.

23. A nucleic acid molecule encoding the chimeric protein of claim 15.

24. The nucleic acid molecule of claim 22, which is represented by SEQ ID NOs: 48 to 64, 66, or 70.

25. The nucleic acid molecule of claim 23, wherein the nucleic acid molecule is represented by SEQ ID NOs: 46, 47, 68, 69, or 71 to 80.

26. A vector comprising the nucleic acid molecule of claim 22.

27. A cell comprising the vector of claim 26.

28. A pharmaceutical composition for the treatment of type A hemophilia comprising the chimeric protein of claim 14, a nucleic acid molecule encoding the chimeric protein of claim 14, a vector comprising the nucleic acid encoding the chimeric protein of claim 14, or a cell carrying the vector comprising the nucleic acid encoding the chimeric protein of claim 14, and a pharmacologically acceptable carrier.

29. The pharmaceutical composition of claim 28, wherein the composition has a half-life such that the composition can be administered once a day or longer, preferably once a week, or especially once a month.

30. A method for treating type A hemophilia comprising administering a therapeutically effective amount of the composition of claim 28 to a subject in need of hemophilia treatment.

31. A method of blood coagulation, comprising administering an effective amount of the composition of claim 28 to a subject in need of hemophilia treatment.

32. (canceled)

The application's sequence listing, which the Patent Office published only in electronic form, follows.

SEQUENCE LISTING (80 sequences)

SEQ ID NO: 1 - protein, 2332 aa, Homo sapiens
  PEPTIDE (1)..(2332): Full length Factor VIII
  MISC_FEATURE (782): Xaa = Isoleucine or Cysteine
ATRRYYLGAVELSWDYMQSDLGELPVDARFPPRVPKSFPFNTSVVYKKTLFVEFTDHLFNIAKPRPPWMGLLGPTIQAEVYDTVVITLKNMASHPVSLHAVGVSYWKASEGAEYDDQTSQREKEDDKVFPGGSHTYVWQVLKENGPMASDPLCLTYSYLSHVDLVKDLNSGLIGALLVCREGSLAKEKTQTLHKFILLFAVFDEGKSWHSETKNSLMQDRDAASARAWPKMHTVNGYVNRSLPGLIGCHRKSVYWHVIGMGTTPEVHSIFLEGHTFLVRNHRQASLEISPITFLTAQTLLMDLGQFLLFCHISSHQHDGMEAYVKVDSCPEEPQLRMKNNEEAEDYDDDLTDSEMDVVRFDDDNSPSFIQIRSVAKKHPKTWVHYIAAEEEDWDYAPLVLAPDDRSYKSQYLNNGPQRIGRKYKKVRFMAYTDETFKTREAIQHESGILGPLLYGEVGDTLLIIFKNQASRPYNIYPHGITDVRPLYSRRLPKGVKHLKDFPILPGEIFKYKWTVTVEDGPTKSDPRCLTRYYSSFVNMERDLASGLIGPLLICYKESVDQRGNQIMSDKRNVILFSVFDENRSWYLTENIQRFLPNPAGVQLEDPEFQASNIMHSINGYVFDSLQLSVCLHEVAYWYILSIGAQTDFLSVFFSGYTFKHKMVYEDTLTLFPFSGETVFMSMENPGLWILGCHNSDFRNRGMTALLKVSSCDKNTGDYYEDSYEDISAYLLSKNNAIEPRSFSQNSRHPSTRQKQFNATTIPENDIEKTDPWFAHRTPMPKXQNVSSSDLLMLLRQSPTPHGLSLSDLQEAKYETFSDDPSPGAIDSNNSLSEMTHFRPQLHHSGDMVFTPESGLQLRLNEKLGTTAATELKKLDFKVSSTSNNLISTIPSDNLAAGTDNTSSLGPPSMPVHYDSQLDTTLFGKKSSPLTESGGPLSLSEENNDSKLLESGLMNSQESSWGKNVSSTESGRLFKGKRAHGPALLTKDNALFKVSISLLKTNKTSNNSATNRKTHIDGPSLLIENSPSVWQNILESDTEFKKVTPLIHDRMLMDKNATALRLNHMSNKTTSSKNMEMVQQKKEGPIPPDAQNPDMSFFKMLFLPESARWIQRTHGKNSLNSGQGPSPKQLVSLGPEKSVEGQNFLSEKNKVVVGKGEFTKDVGLKEMVFPSSRNLFLTNLDNLHENNTHNQEKKIQEEIEKKETLIQENVVLPQIHTVTGTKNFMKNLFLLSTRQNVEGSYDGAYAPVLQDFRSLNDSTNRTKKHTAHFSKKGEEENLEGLGNQTKQIVEKYACTTRISPNTSQQNFVTQRSKRALKQFRLPLEETELEKRIIVDDTSTQWSKNMKHLTPSTLTQIDYNEKEKGAITQSPLSDCLTRSHSIPQANRSPLPIAKVSSFPSIRPIYLTRVLFQDNSSHLPAASYRKKDSGVQESSHFLQGAKKNNLSLAILTLEMTGDQREVGSLGTSATNSVTYKKVENTVLPKPDLPKTSGKVELLPKVHIYQKDLFPTETSNGSPGHLDLVEGSLLQGTEGAIKWNEANRPGKVPFLRVATESSAKTPSKLLDPLAWDNHYGTQIPKEEWKSQEKSPEKTAFKKKDTILSLNACESNHAIAAINEGQNKPEIEVTWAKQGRTERLCSQNPPVLKRHQREITRTTLQSDQEEIDYDDTISVEMKKEDFDIYDEDENQSPRSFQKKTRHYFIAAVERLWDYGMSSSPHVLRNRAQSGSVPQFKKVVFQEFTDGSFTQPLYRGELNEHLGLLGPYIRAEVEDNIMVTFRNQASRPYSFYSSLISYEEDQRQGAEPRKNFVKPNETKTYFWKVQHHMAPTKDEFDCKAWAYFSDVDLEKDVHSGLIGPLLVCHTNTLNPAHGRQVTVQEFALFFTIFDETKSWYFTENMERNCRAPCNIQMEDPTFKENYRFHAINGYIMDTLPGLVMAQDQRIRWYLLSMGSNENIHSIHFSGHVFTVRKKEEYKMALYNLYPGVFETVEMLPSKAGIWRVECLIGEHLHAGMSTLFLVYSNKCQTPLGMASGHIRDFQITASGQYGQWAPKLARLHYSGSINAWSTKEPFSWIKVDLLAPMIIHGIKTQGARQKFSSLYISQFIIMYSLDGKKWQTYRGNSTGTLMVFFGNVDSSGIKHNIFNPPIIARYIRLHPTHYSIRSTLRMELMGCDLNSCSMPLGMESKAISDAQITASSYFTNMFATWSPSKARLHLQGRSNAWRPQVNNPKEWLQVDFQKTMKVTGVTTQGVKSLLTSMYVKEFLISSSQDGHQWTLFFQNGKVKVFQGNQDSFTPVVNSLDPPLLTRYLRIHPQSWVHQIALRMEVLGCEAQDLY

SEQ ID NO: 2 - protein, 2791 aa, Homo sapiens
  PEPTIDE (1)..(2791): Full length vWF
AEGTRGRSSTARCSLFGSDFVNTFDGSMYSFAGYCSYLLAGGCQKRSFSIIGDFQNGKRVSLSVYLGEFFDIHLFVNGTVTQGDQRVSMPYASKGLYLETEAGYYKLSGEAYGFVARIDGSGNFQVLLSDRYFNKTCGLCGNFNIFAEDDFMTQEGTLTSDPYDFANSWALSSGEQWCERASPPSSSCNISSGEMQKGLWEQCQLLKSTSVFARCHPLVDPEPFVALCEKTLCECAGGLECACPALLEYARTCAQEGMVLYGWTDHSACSPVCPAGMEYRQCVSPCARTCQSLHINEMCQERCVDGCSCPEGQLLDEGLCVESTECPCVHSGKRYPPGTSLSRDCNTCICRNSQWICSNEECPGECLVTGQSHFKSFDNRYFTFSGICQYLLARDCQDHSFSIVIETVQCADDRDAVCTRSVTVRLPGLHNSLVKLKHGAGVAMDGQDVQLPLLKGDLRIQHTVTASVRLSYGEDLQMDWDGRGRLLVKLSPVYAGKTCGLCGNYNGNQGDDFLTPSGLAEPRVEDFGNAWKLHGDCQDLQKQHSDPCALNPRMTRFSEEACAVLTSPTFEACHRAVSPLPYLRNCRYDVCSCSDGRECLCGALASYAAACAGRGVRVAWREPGRCELNCPKGQVYLQCGTPCNLTCRSLSYPDEECNEACLEGCFCPPGLYMDERGDCVPKAQCPCYYDGEIFQPEDIFSDHHTMCYCEDGFMHCTMSGVPGSLLPDAVLSSPLSHRSKRSLSCRPPMVKLVCPADNLRAEGLECTKTCQNYDLECMSMGCVSGCLCPPGMVRHENRCVALERCPCFHQGKEYAPGETVKIGCNTCVCRDRKWNCTDHVCDATCSTIGMAHYLTFDGLKYLFPGECQYVLVQDYCGSNPGTFRILVGNKGCSHPSVKCKKRVTILVEGGEIELFDGEVNVKRPMKDETHFEVVESGRYIILLLGKALSVVWDRHLSISVVLKQTYQEKVCGLCGNFDGIQNNDLTSSNLQVEEDPVDFGNSWKVSSQCADTRKVPLDSSPATCHNNIMKQTMVDSSCRILTSDVFQDCNKLVDPEPYLDVCIYDTCSCESIGDCACFCDTIAAYAHVCAQHGKVVTWRTATLCPQSCEERNLRENGYECEWRYNSCAPACQVTCQHPEPLACPVQCVEGCHAHCPPGKILDELLQTCVDPEDCPVCEVAGRRFASGKKVTLNPSDPEHCQICHCDVVNLTCEACQEPGGLVVPPTDAPVSPTTLYVEDISEPPLHDFYCSRLLDLVFLLDGSSRLSEAEFEVLKAFVVDMMERLRISQKWVRVAVVEYHDGSHAYIGLKDRKRPSELRRIASQVKYAGSQVASTSEVLKYTLFQIFSKIDRPEASRITLLLMASQEPQRMSRNFVRYVQGLKKKKVIVIPVGIGPHANLKQIRLIEKQAPENKAFVLSSVDELEQQRDEIVSYLCDLAPEAPPPTLPPDMAQVTVGPGLLGVSTLGPKRNSMVLDVAFVLEGSDKIGEADFNRSKEFMEEVIQRMDVGQDSIHVTVLQYSYMVTVEYPFSEAQSKGDILQRVREIRYQGGNRTNTGLALRYLSDHSFLVSQGDREQAPNLVYMVTGNPASDEIKRLPGDIQVVPIGVGPNANVQELERIGWPNAPILIQDFETLPREAPDLVLQRCCSGEGLQIPTLSPAPDCSQPLDVILLLDGSSSFPASYFDEMKSFAKAFISKANIGPRLTQVSVLQYGSITTIDVPWNVVPEKAHLLSLVDVMQREGGPSQIGDALGFAVRYLTSEMHGARPGASKAVVILVTDVSVDSVDAAADAARSNRVTVFPIGIGDRYDAAQLRILAGPAGDSNVVKLQRIEDLPTMVTLGNSFLHKLCSGFVRICMDEDGNEKRPGDVWTLPDQCHTVTCQPDGQTLLKSHRVNCDRGLRPSCPNSQSPVKVEETCGCRWTCPCVCTGSSTRHIVTFDGQNFKLTGSCSYVLFQNKEQDLEVILHNGACSPGARQGCMKSIEVKHSALSVELHSDMEVTVNGRLVSVPYVGGNMEVNVYGAIMHEVRFNHLGHIFTFTPQNNEFQLQLSPKTFASKTYGLCGICDENGANDFMLRDGTVTTDWKTLVQEWTVQRPGQTCQPILEEQCLVPDSSHCQVLLLPLFAECHKVLAPATFYAICQQDSCHQEQVCEVIASYAHLCRTNGVCVDWRTPDFCAMSCPPSLVYNHCEHGCPRHCDGNVSSCGDHPSEGCFCPPDKVMLEGSCVPEEACTQCIGEDGVQHQFLEAWVPDHQPCQICTCLSGRKVNCTTQPCPTAKAPTCGLCEVARLRQNADQCCPEYECVCDPVSCDLPPVPHCERGLQPTLTNPGECRPNFTCACRKEECKRVSPPSCPPHRLPTLRKTQCCDEYECACNCVNSTVSCPLGYLASTATNDCGCTTTTCLPDKVCVHRSTIYPVGQFWEEGCDVCTCTDMEDAVMGLRVAQCSQKPCEDSCRSGFTYVLHEGECCGRCLPSACEVVTGSPRGDSQSSWKSVGSQWASPENPCLINECVRVKEEVFIQQRNVSCPQLEVPVCPSGFQLSCKTSACCPSCRCERMEACMLNGTVIGPGKTVMIDVCTTCRCMVQVGVISGFKLECRKTTCNPCPLGYKEENNTGECCGRCLPTACTIQLRGGQIMTLKRDETLQDGCDTHFCKVNERGEYFWEKRVTGCPPFDEHKCLAEGGKIMKIPGTCCDTCEEPECNDITARLQYVKVGSCKSEVEVDIHYCQGKCASKAMYSIDINDVQDQCSCCSPTRTEPMQVALHCTNGSVVYHEVLNAMECKCSPRKCSK

SEQ ID NO: 3 - protein, 1581 aa, Artificial Sequence
  Single chain FVIII with partial B domain
  MISC_FEATURE (782): Xaa = Isoleucine or Cysteine
ATRRYYLGAVELSWDYMQSDLGELPVDARFPPRVPKSFPFNTSVVYKKTLFVEFTDHLFNIAKPRPPWMGLLGPTIQAEVYDTVVITLKNMASHPVSLHAVGVSYWKASEGAEYDDQTSQREKEDDKVFPGGSHTYVWQVLKENGPMASDPLCLTYSYLSHVDLVKDLNSGLIGALLVCREGSLAKEKTQTLHKFILLFAVFDEGKSWHSETKNSLMQDRDAASARAWPKMHTVNGYVNRSLPGLIGCHRKSVYWHVIGMGTTPEVHSIFLEGHTFLVRNHRQASLEISPITFLTAQTLLMDLGQFLLFCHISSHQHDGMEAYVKVDSCPEEPQLRMKNNEEAEDYDDDLTDSEMDVVRFDDDNSPSFIQIRSVAKKHPKTWVHYIAAEEEDWDYAPLVLAPDDRSYKSQYLNNGPQRIGRKYKKVRFMAYTDETFKTREAIQHESGILGPLLYGEVGDTLLIIFKNQASRPYNIYPHGITDVRPLYSRRLPKGVKHLKDFPILPGEIFKYKWTVTVEDGPTKSDPRCLTRYYSSFVNMERDLASGLIGPLLICYKESVDQRGNQIMSDKRNVILFSVFDENRSWYLTENIQRFLPNPAGVQLEDPEFQASNIMHSINGYVFDSLQLSVCLHEVAYWYILSIGAQTDFLSVFFSGYTFKHKMVYEDTLTLFPFSGETVFMSMENPGLWILGCHNSDFRNRGMTALLKVSSCDKNTGDYYEDSYEDISAYLLSKNNAIEPRSFSQNSRHPSTRQKQFNATTIPENDIEKTDPWFAHRTPMPKXQNVSSSDLLMLLRQSPTPHGLSLSDLQEAKYETFSDDPSPGAIDSNNSLSEMTHFRPQLHHSGDMVFTPESGLQLRLNEKLGTTAATELKKLDFKVSSTSNNLISTIPSDNLAAGTDNTSTLQSDQEEIDYDDTISVEMKKEDFDIYDEDENQSPRSFQKKTRHYFIAAVERLWDYGMSSSPHVLRNRAQSGSVPQFKKVVFQEFTDGSFTQPLYRGELNEHLGLLGPYIRAEVEDNIMVTFRNQASRPYSFYSSLISYEEDQRQGAEPRKNFVKPNETKTYFWKVQHHMAPTKDEFDCKAWAYFSDVDLEKDVHSGLIGPLLVCHTNTLNPAHGRQVTVQEFALFFTIFDETKSWYFTENMERNCRAPCNIQMEDPTFKENYRFHAINGYIMDTLPGLVMAQDQRIRWYLLSMGSNENIHSIHFSGHVFTVRKKEEYKMALYNLYPGVFETVEMLPSKAGIWRVECLIGEHLHAGMSTLFLVYSNKCQTPLGMASGHIRDFQITASGQYGQWAPKLARLHYSGSINAWSTKEPFSWIKVDLLAPMIIHGIKTQGARQKFSSLYISQFIIMYSLDGKKWQTYRGNSTGTLMVFFGNVDSSGIKHNIFNPPIIARYIRLHPTHYSIRSTLRMELMGCDLNSCSMPLGMESKAISDAQITASSYFTNMFATWSPSKARLHLQGRSNAWRPQVNNPKEWLQVDFQKTMKVTGVTTQGVKSLLTSMYVKEFLISSSQDGHQWTLFFQNGKVKVFQGNQDSFTPVVNSLDPPLLTRYLRIHPQSWVHQIALRMEVLGCEAQDLY

SEQ ID NO: 4 - protein, 1443 aa, Artificial Sequence
  dcFVIII/D'D3-HC Heavy chain
ATRRYYLGAVELSWDYMQSDLGELPVDARFPPRVPKSFPFNTSVVYKKTLFVEFTDHLFNIAKPRPPWMGLLGPTIQAEVYDTVVITLKNMASHPVSLHAVGVSYWKASEGAEYDDQTSQREKEDDKVFPGGSHTYVWQVLKENGPMASDPLCLTYSYLSHVDLVKDLNSGLIGALLVCREGSLAKEKTQTLHKFILLFAVFDEGKSWHSETKNSLMQDRDAASARAWPKMHTVNGYVNRSLPGLIGCHRKSVYWHVIGMGTTPEVHSIFLEGHTFLVRNHRQASLEISPITFLTAQTLLMDLGQFLLFCHISSHQHDGMEAYVKVDSCPEEPQLRMKNNEEAEDYDDDLTDSEMDVVRFDDDNSPSFIQIRSVAKKHPKTWVHYIAAEEEDWDYAPLVLAPDDRSYKSQYLNNGPQRIGRKYKKVRFMAYTDETFKTREAIQHESGILGPLLYGEVGDTLLIIFKNQASRPYNIYPHGITDVRPLYSRRLPKGVKHLKDFPILPGEIFKYKWTVTVEDGPTKSDPRCLTRYYSSFVNMERDLASGLIGPLLICYKESVDQRGNQIMSDKRNVILFSVFDENRSWYLTENIQRFLPNPAGVQLEDPEFQASNIMHSINGYVFDSLQLSVCLHEVAYWYILSIGAQTDFLSVFFSGYTFKHKMVYEDTLTLFPFSGETVFMSMENPGLWILGCHNSDFRNRGMTALLKVSSCDKNTGDYYEDSYEDISAYLLSKNNAIEPRSFSQNSRHPSTRQKQFNATTIPENDIEKTDPWFAHRTPMPKCQNVSSSDLLMLLRQSPTPHGLSLSDLQEAKYETFSDDPSPGAIDSNNSLSEMTHFRPQLHHSGDMVFTPESGLQLRLNEKLGTTAATELKKLDFKVSSTSNNLISTIPSDNLAAGTDNTSSLGPPSMPVHYDSQLDTTLFGKKSSPLTESGGPLSLSCRPPMVKLVCPADNLRAEGLECTKTCQNYDLECMSMGCVSGCLCPPGMVRHENRCVALERCPCFHQGKEYAPGETVKIGCNTCVCRDRKWNCTDHVCDATCSTIGMAHYLTFDGLKYLFPGECQYVLVQDYCGSNPGTFRILVGNKGCSHPSVKCKKRVTILVEGGEIELFDGEVNVKRPMKDETHFEVVESGRYIILLLGKALSVVWDRHLSISVVLKQTYQEKVCGLCGNFDGIQNNDLTSSNLQVEEDPVDFGNSWKVSSQCADTRKVPLDSSPATCHNNIMKQTMVDSSCRILTSDVFQDCNKLVDPEPYLDVCIYDTCSCESIGDCACFCDTIAAYAHVCAQHGKVVTWRTATLCPQSCEERNLRENGYECEWRYNSCAPACQVTCQHPEPLACPVQCVEGCHAHCPPGKILDELLQTCVDPEDCPVCEVAGRRFASGKKVTLNPSDPEHCQICHCDVVNLTCEACQEPGGLVVPPTDAPVSPTTLYVEDISEPPLHDF

SEQ ID NO: 5 - protein, 772 aa, Artificial Sequence
  dcFVIII/D'D3-HC Light chain
ATDPLAWDNHYGTQIPKEEWKSQEKSPEKTAFKKKDTILSLNACESNHAIAAINEGQNKPEIEVTWAKQGRTERLCSQNPPVLKRHQREITRTTLQSDQEEIDYDDTISVEMKKEDFDIYDEDENQSPRSFQKKTRHYFIAAVERLWDYGMSSSPHVLRNRAQSGSVPQFKKVVFQEFTDGSFTQPLYRGELNEHLGLLGPYIRAEVEDNIMVTFRNQASRPYSFYSSLISYEEDQRQGAEPRKNFVKPNETKTYFWKVQHHMAPTKDEFDCKAWAYFSDVDLEKDVHSGLIGPLLVCHTNTLNPAHGRQVTVQEFALFFTIFDETKSWYFTENMERNCRAPCNIQMEDPTFKENYRFHAINGYIMDTLPGLVMAQDQRIRWYLLSMGSNENIHSIHFSGHVFTVRKKEEYKMALYNLYPGVFETVEMLPSKAGIWRVECLIGEHLHAGMSTLFLVYSNKCQTPLGMASGHIRDFQITASGQYGQWAPKLARLHYSGSINAWSTKEPFSWIKVDLLAPMIIHGIKTQGARQKFSSLYISQFIIMYSLDGKKWQTYRGNSTGTLMVFFGNVDSSGIKHNIFNPPIIARYIRLHPTHYSIRSTLRMELMGCDLNSCSMPLGMESKAISDAQITASSYFTNMFATWSPSKARLHLQGRSNAWRPQVNNPKEWLQVDFQKTMKVTGVTTQGVKSLLTSMYVKEFLISSSQDGHQWTLFFQNGKVKVFQGNQDSFTPVVNSLDPPLLTRYLRIHPQSWVHQIALRMEVLGCEAQDLY

SEQ ID NO: 6 - protein, 2094 aa, Artificial Sequence
  scFVIII/D'D3-6
ATRRYYLGAVELSWDYMQSDLGELPVDARFPPRVPKSFPFNTSVVYKKTLFVEFTDHLFNIAKPRPPWMGLLGPTIQAEVYDTVVITLKNMASHPVSLHAVGVSYWKASEGAEYDDQTSQREKEDDKVFPGGSHTYVWQVLKENGPMASDPLCLTYSYLSHVDLVKDLNSGLIGALLVCREGSLAKEKTQTLHKFILLFAVFDEGKSWHSETKNSLMQDRDAASARAWPKMHTVNGYVNRSLPGLIGCHRKSVYWHVIGMGTTPEVHSIFLEGHTFLVRNHRQASLEISPITFLTAQTLLMDLGQFLLFCHISSHQHDGMEAYVKVDSCPEEPQLRMKNNEEAEDYDDDLTDSEMDVVRFDDDNSPSFIQIRSVAKKHPKTWVHYIAAEEEDWDYAPLVLAPDDRSYKSQYLNNGPQRIGRKYKKVRFMAYTDETFKTREAIQHESGILGPLLYGEVGDTLLIIFKNQASRPYNIYPHGITDVRPLYSRRLPKGVKHLKDFPILPGEIFKYKWTVTVEDGPTKSDPRCLTRYYSSFVNMERDLASGLIGPLLICYKESVDQRGNQIMSDKRNVILFSVFDENRSWYLTENIQRFLPNPAGVQLEDPEFQASNIMHSINGYVFDSLQLSVCLHEVAYWYILSIGAQTDFLSVFFSGYTFKHKMVYEDTLTLFPFSGETVFMSMENPGLWILGCHNSDFRNRGMTALLKVSSCDKNTGDYYEDSYEDISAYLLSKNNAIEPRSFSQNSRHPSTRQKQFNATTIPENDIEKTDPWFAHRTPMPKCQNVSSSDLLMLLRQSPTPHGLSLSDLQEAKYETFSDDPSPGAIDSNNSLSEMTHFRPQLHHSGDMVFTPESGLQLRLNEKLGTTAATELKKLDFKVSSTSNNLISTIPSDNLAAGTDNTSTLQSDQEEIDYDDTISVEMKKEDFDIYDEDENQSPRSFQKKTRHYFIAAVERLWDYGMSSSPHVLRNRAQSGSVPQFKKVVFQEFTDGSFTQPLYRGELNEHLGLLGPYIRAEVEDNIMVTFRNQASRPYSFYSSLISYEEDQRQGAEPRKNFVKPNETKTYFWKVQHHMAPTKDEFDCKAWAYFSDVDLEKDVHSGLIGPLLVCHTNTLNPAHGRQVTVQEFALFFTIFDETKSWYFTENMERNCRAPCNIQMEDPTFKENYRFHAINGYIMDTLPGLVMAQDQRIRWYLLSMGSNENIHSIHFSGHVFTVRKKEEYKMALYNLYPGVFETVEMLPSKAGIWRVECLIGEHLHAGMSTLFLVYSNKCQTPLGMASGHIRDFQITASGQYGQWAPKLARLHYSGSINAWSTKEPFSWIKVDLLAPMIIHGIKTQGARQKFSSLYISQFIIMYSLDGKKWQTYRGNSTGTLMVFFGNVDSSGIKHNIFNPPIIARYIRLHPTHYSIRSTLRMELMGCDLNSCSMPLGMESKAISDAQITASSYFTNMFATWSPSKARLHLQGRSNAWRPQVNNPKEWLQVDFQKTMKVTGVTTQGVKSLLTSMYVKEFLISSSQDGHQWTLFFQNGKVKVFQGNQDSFTPVVNSLDPPLLTRYLRIHPQSWVHQIALRMEVLGCEAQDLYLVPRGSSLSCRPPMVKLVCPADNLRAEGLECTKTCQNYDLECMSMGCVSGCLCPPGMVRHENRCVALERCPCFHQGKEYAPGETVKIGCNTCVCRDRKWNCTDHVCDATCSTIGMAHYLTFDGLKYLFPGECQYVLVQDYCGSNPGTFRILVGNKGCSHPSVKCKKRVTILVEGGEIELFDGEVNVKRPMKDETHFEVVESGRYIILLLGKALSVVWDRHLSISVVLKQTYQEKVCGLCGNFDGIQNNDLTSSNLQVEEDPVDFGNSWKVSSQCADTRKVPLDSSPATCHNNIMKQTMVDSSCRILTSDVFQDCNKLVDPEPYLDVCIYDTCSCESIGDCACFCDTIAAYAHVCAQHGKVVTWRTATLCPQSCEERNLRENGYECEWRYNSCAPACQVTCQHPEPLACPVQCVEGCHAHCPPGKILDELLQTCVDPEDCPVCEVAGRRFASGKKVTLNPSDPEHCQICHCDVVNLTCEACQEPGGLVVPPTDAPVSPTTLYVEDISEPPLHDF

SEQ ID NO: 7 - protein, 2098 aa, Artificial Sequence
  scFVIII/D'D3-10
ATRRYYLGAVELSWDYMQSDLGELPVDARFPPRVPKSFPFNTSVVYKKTLFVEFTDHLFNIAKPRPPWMGLLGPTIQAEVYDTVVITLKNMASHPVSLHAVGVSYWKASEGAEYDDQTSQREKEDDKVFPGGSHTYVWQVLKENGPMASDPLCLTYSYLSHVDLVKDLNSGLIGALLVCREGSLAKEKTQTLHKFILLFAVFDEGKSWHSETKNSLMQDRDAASARAWPKMHTVNGYVNRSLPGLIGCHRKSVYWHVIGMGTTPEVHSIFLEGHTFLVRNHRQASLEISPITFLTAQTLLMDLGQFLLFCHISSHQHDGMEAYVKVDSCPEEPQLRMKNNEEAEDYDDDLTDSEMDVVRFDDDNSPSFIQIRSVAKKHPKTWVHYIAAEEEDWDYAPLVLAPDDRSYKSQYLNNGPQRIGRKYKKVRFMAYTDETFKTREAIQHESGILGPLLYGEVGDTLLIIFKNQASRPYNIYPHGITDVRPLYSRRLPKGVKHLKDFPILPGEIFKYKWTVTVEDGPTKSDPRCLTRYYSSFVNMERDLASGLIGPLLICYKESVDQRGNQIMSDKRNVILFSVFDENRSWYLTENIQRFLPNPAGVQLEDPEFQASNIMHSINGYVFDSLQLSVCLHEVAYWYILSIGAQTDFLSVFFSGYTFKHKMVYEDTLTLFPFSGETVFMSMENPGLWILGCHNSDFRNRGMTALLKVSSCDKNTGDYYEDSYEDISAYLLSKNNAIEPRSFSQNSRHPSTRQKQFNATTIPENDIEKTDPWFAHRTPMPKCQNVSSSDLLMLLRQSPTPHGLSLSDLQEAKYETFSDDPSPGAIDSNNSLSEMTHFRPQLHHSGDMVFTPESGLQLRLNEKLGTTAATELKKLDFKVSSTSNNLISTIPSDNLAAGTDNTSTLQSDQEEIDYDDTISVEMKKEDFDIYDEDENQSPRSFQKKTRHYFIAAVERLWDYGMSSSPHVLRNRAQSGSVPQFKKVVFQEFTDGSFTQPLYRGELNEHLGLLGPYIRAEVEDNIMVTFRNQASRPYSFYSSLISYEEDQRQGAEPRKNFVKPNETKTYFWKVQHHMAPTKDEFDCKAWAYFSDVDLEKDVHSGLIGPLLVCHTNTLNPAHGRQVTVQEFALFFTIFDETKSWYFTENMERNCRAPCNIQMEDPTFKENYRFHAINGYIMDTLPGLVMAQDQRIRWYLLSMGSNENIHSIHFSGHVFTVRKKEEYKMALYNLYPGVFETVEMLPSKAGIWRVECLIGEHLHAGMSTLFLVYSNKCQTPLGMASGHIRDFQITASGQYGQWAPKLARLHYSGSINAWSTKEPFSWIKVDLLAPMIIHGIKTQGARQKFSSLYISQFIIMYSLDGKKWQTYRGNSTGTLMVFFGNVDSSGIKHNIFNPPIIARYIRLHPTHYSIRSTLRMELMGCDLNSCSMPLGMESKAISDAQITASSYFTNMFATWSPSKARLHLQGRSNAWRPQVNNPKEWLQVDFQKTMKVTGVTTQGVKSLLTSMYVKEFLISSSQDGHQWTLFFQNGKVKVFQGNQDSFTPVVNSLDPPLLTRYLRIHPQSWVHQIALRMEVLGCEAQDLYLVPRGSGGGGSLSCRPPMVKLVCPADNLRAEGLECTKTCQNYDLECMSMGCVSGCLCPPGMVRHENRCVALERCPCFHQGKEYAPGETVKIGCNTCVCRDRKWNCTDHVCDATCSTIGMAHYLTFDGLKYLFPGECQYVLVQDYCGSNPGTFRILVGNKGCSHPSVKCKKRVTILVEGGEIELFDGEVNVKRPMKDETHFEVVESGRYIILLLGKALSVVWDRHLSISVVLKQTYQEKVCGLCGNFDGIQNNDLTSSNLQVEEDPVDFGNSWKVSSQCADTRKVPLDSSPATCHNNIMKQTMVDSSCRILTSDVFQDCNKLVDPEPYLDVCIYDTCSCESIGDCACFCDTIAAYAHVCAQHGKVVTWRTATLCPQSCEERNLRENGYECEWRYNSCAPACQVTCQHPEPLACPVQCVEGCHAHCPPGKILDELLQTCVDPEDCPVCEVAGRRFASGKKVTLNPSDPEHCQICHCDVVNLTCEACQEPGGLVVPPTDAPVSPTTLYVEDISEPPLHDF

SEQ ID NO: 8 - protein, 2108 aa, Artificial Sequence
  scFVIII/D'D3-20
ATRRYYLGAVELSWDYMQSDLGELPVDARFPPRVPKSFPFNTSVVYKKTLFVEFTDHLFNIAKPRPPWMGLLGPTIQAEVYDTVVITLKNMASHPVSLHAVGVSYWKASEGAEYDDQTSQREKEDDKVFPGGSHTYVWQVLKENGPMASDPLCLTYSYLSHVDLVKDLNSGLIGALLVCREGSLAKEKTQTLHKFILLFAVFDEGKSWHSETKNSLMQDRDAASARAWPKMHTVNGYVNRSLPGLIGCHRKSVYWHVIGMGTTPEVHSIFLEGHTFLVRNHRQASLEISPITFLTAQTLLMDLGQFLLFCHISSHQHDGMEAYVKVDSCPEEPQLRMKNNEEAEDYDDDLTDSEMDVVRFDDDNSPSFIQIRSVAKKHPKTWVHYIAAEEEDWDYAPLVLAPDDRSYKSQYLNNGPQRIGRKYKKVRFMAYTDETFKTREAIQHESGILGPLLYGEVGDTLLIIFKNQASRPYNIYPHGITDVRPLYSRRLPKGVKHLKDFPILPGEIFKYKWTVTVEDGPTKSDPRCLTRYYSSFVNMERDLASGLIGPLLICYKESVDQRGNQIMSDKRNVILFSVFDENRSWYLTENIQRFLPNPAGVQLEDPEFQASNIMHSINGYVFDSLQLSVCLHEVAYWYILSIGAQTDFLSVFFSGYTFKHKMVYEDTLTLFPFSGETVFMSMENPGLWILGCHNSDFRNRGMTALLKVSSCDKNTGDYYEDSYEDISAYLLSKNNAIEPRSFSQNSRHPSTRQKQFNATTIPENDIEKTDPWFAHRTPMPKCQNVSSSDLLMLLRQSPTPHGLSLSDLQEAKYETFSDDPSPGAIDSNNSLSEMTHFRPQLHHSGDMVFTPESGLQLRLNEKLGTTAATELKKLDFKVSSTSNNLISTIPSDNLAAGTDNTSTLQSDQEEIDYDDTISVEMKKEDFDIYDEDENQSPRSFQKKTRHYFIAAVERLWDYGMSSSPHVLRNRAQSGSVPQFKKVVFQEFTDGSFTQPLYRGELNEHLGLLGPYIRAEVEDNIMVTFRNQASRPYSFYSSLISYEEDQRQGAEPRKNFVKPNETKTYFWKVQHHMAPTKDEFDCKAWAYFSDVDLEKDVHSGLIGPLLVCHTNTLNPAHGRQVTVQEFALFFTIFDETKSWYFTENMERNCRAPCNIQMEDPTFKENYRFHAINGYIMDTLPGLVMAQDQRIRWYLLSMGSNENIHSIHFSGHVFTVRKKEEYKMALYNLYPGVFETVEMLPSKAGIWRVECLIGEHLHAGMSTLFLVYSNKCQTPLGMASGHIRDFQITASGQYGQWAPKLARLHYSGSINAWSTKEPFSWIKVDLLAPMIIHGIKTQGARQKFSSLYISQFIIMYSLDGKKWQTYRGNSTGTLMVFFGNVDSSGIKHNIFNPPIIARYIRLHPTHYSIRSTLRMELMGCDLNSCSMPLGMESKAISDAQITASSYFTNMFATWSPSKARLHLQGRSNAWRPQVNNPKEWLQVDFQKTMKVTGVTTQGVKSLLTSMYVKEFLISSSQDGHQWTLFFQNGKVKVFQGNQDSFTPVVNSLDPPLLTRYLRIHPQSWVHQIALRMEVLGCEAQDLYLVPRGSGGGGSGGGGSGGGGSLSCRPPMVKLVCPADNLRAEGLECTKTCQNYDLECMSMGCVSGCLCPPGMVRHENRCVALERCPCFHQGKEYAPGETVKIGCNTCVCRDRKWNCTDHVCDATCSTIGMAHYLTFDGLKYLFPGECQYVLVQDYCGSNPGTFRILVGNKGCSHPSVKCKKRVTILVEGGEIELFDGEVNVKRPMKDETHFEVVESGRYIILLLGKALSVVWDRHLSISVVLKQTYQEKVCGLCGNFDGIQNNDLTSSNLQVEEDPVDFGNSWKVSSQCADTRKVPLDSSPATCHNNIMKQTMVDSSCRILTSDVFQDCNKLVDPEPYLDVCIYDTCSCESIGDCACFCDTIAAYAHVCAQHGKVVTWRTATLCPQSCEERNLRENGYECEWRYNSCAPACQVTCQHPEPLACPVQCVEGCHAHCPPGKILDELLQTCVDPEDCPVCEVAGRRFASGKKVTLNPSDPEHCQICHCDVVNLTCEACQEPGGLVVPPTDAPVSPTTLYVEDISEPPLHDF

SEQ ID NO: 9 - protein, 2118 aa, Artificial Sequence
  scFVIII/D'D3-30
ATRRYYLGAVELSWDYMQSDLGELPVDARFPPRVPKSFPFNTSVVYKKTLFVEFTDHLFNIAKPRPPWMGLLGPTIQAEVYDTVVITLKNMASHPVSLHAVGVSYWKASEGAEYDDQTSQREKEDDKVFPGGSHTYVWQVLKENGPMASDPLCLTYSYLSHVDLVKDLNSGLIGALLVCREGSLAKEKTQTLHKFILLFAVFDEGKSWHSETKNSLMQDRDAASARAWPKMHTVNGYVNRSLPGLIGCHRKSVYWHVIGMGTTPEVHSIFLEGHTFLVRNHRQASLEISPITFLTAQTLLMDLGQFLLFCHISSHQHDGMEAYVKVDSCPEEPQLRMKNNEEAEDYDDDLTDSEMDVVRFDDDNSPSFIQIRSVAKKHPKTWVHYIAAEEEDWDYAPLVLAPDDRSYKSQYLNNGPQRIGRKYKKVRFMAYTDETFKTREAIQHESGILGPLLYGEVGDTLLIIFKNQASRPYNIYPHGITDVRPLYSRRLPKGVKHLKDFPILPGEIFKYKWTVTVEDGPTKSDPRCLTRYYSSFVNMERDLASGLIGPLLICYKESVDQRGNQIMSDKRNVILFSVFDENRSWYLTENIQRFLPNPAGVQLEDPEFQASNIMHSINGYVFDSLQLSVCLHEVAYWYILSIGAQTDFLSVFFSGYTFKHKMVYEDTLTLFPFSGETVFMSMENPGLWILGCHNSDFRNRGMTALLKVSSCDKNTGDYYEDSYEDISAYLLSKNNAIEPRSFSQNSRHPSTRQKQFNATTIPENDIEKTDPWFAHRTPMPKCQNVSSSDLLMLLRQSPTPHGLSLSDLQEAKYETFSDDPSPGAIDSNNSLSEMTHFRPQLHHSGDMVFTPESGLQLRLNEKLGTTAATELKKLDFKVSSTSNNLISTIPSDNLAAGTDNTSTLQSDQEEIDYDDTISVEMKKEDFDIYDEDENQSPRSFQKKTRHYFIAAVERLWDYGMSSSPHVLRNRAQSGSVPQFKKVVFQEFTDGSFTQPLYRGELNEHLGLLGPYIRAEVEDNIMVTFRNQASRPYSFYSSLISYEEDQRQGAEPRKNFVKPNETKTYFWKVQHHMAPTKDEFDCKAWAYFSDVDLEKDVHSGLIGPLLVCHTNTLNPAHGRQVTVQEFALFFTIFDETKSWYFTENMERNCRAPCNIQMEDPTFKENYRFHAINGYIMDTLPGLVMAQDQRIRWYLLSMGSNENIHSIHFSGHVFTVRKKEEYKMALYNLYPGVFETVEMLPSKAGIWRVECLIGEHLHAGMSTLFLVYSNKCQTPLGMASGHIRDFQITASGQYGQWAPKLARLHYSGSINAWSTKEPFSWIKVDLLAPMIIHGIKTQGARQKFSSLYISQFIIMYSLDGKKWQTYRGNSTGTLMVFFGNVDSSGIKHNIFNPPIIARYIRLHPTHYSIRSTLRMELMGCDLNSCSMPLGMESKAISDAQITASSYFTNMFATWSPSKARLHLQGRSNAWRPQVNNPKEWLQVDFQKTMKVTGVTTQGVKSLLTSMYVKEFLISSSQDGHQWTLFFQNGKVKVFQGNQDSFTPVVNSLDPPLLTRYLRIHPQSWVHQIALRMEVLGCEAQDLYLVPRGSGGGGSGGGGSGGGGSGGGGSGGGGSLSCRPPMVKLVCPADNLRAEGLECTKTCQNYDLECMSMGCVSGCLCPPGMVRHENRCVALERCPCFHQGKEYAPGETVKIGCNTCVCRDRKWNCTDHVCDATCSTIGMAHYLTFDGLKYLFPGECQYVLVQDYCGSNPGTFRILVGNKGCSHPSVKCKKRVTILVEGGEIELFDGEVNVKRPMKDETHFEVVESGRYIILLLGKALSVVWDRHLSISVVLKQTYQEKVCGLCGNFDGIQNNDLTSSNLQVEEDPVDFGNSWKVSSQCADTRKVPLDSSPATCHNNIMKQTMVDSSCRILTSDVFQDCNKLVDPEPYLDVCIYDTCSCESIGDCACFCDTIAAYAHVCAQHGKVVTWRTATLCPQSCEERNLRENGYECEWRYNSCAPACQVTCQHPEPLACPVQCVEGCHAHCPPGKILDELLQTCVDPEDCPVCEVAGRRFASGKKVTLNPSDPEHCQICHCDVVNLTCEACQEPGGLVVPPTDAPVSPTTLYVEDISEPPLHDF

SEQ ID NO: 10 - protein, 2128 aa, Artificial Sequence
  scFVIII/D'D3-40
ATRRYYLGAVELSWDYMQSDLGELPVDARFPPRVPKSFPFNTSVVYKKTLFVEFTDHLFNIAKPRPPWMGLLGPTIQAEVYDTVVITLKNMASHPVSLHAVGVSYWKASEGAEYDDQTSQREKEDDKVFPGGSHTYVWQVLKENGPMASDPLCLTYSYLSHVDLVKDLNSGLIGALLVCREGSLAKEKTQTLHKFILLFAVFDEGKSWHSETKNSLMQDRDAASARAWPKMHTVNGYVNRSLPGLIGCHRKSVYWHVIGMGTTPEVHSIFLEGHTFLVRNHRQASLEISPITFLTAQTLLMDLGQFLLFCHISSHQHDGMEAYVKVDSCPEEPQLRMKNNEEAEDYDDDLTDSEMDVVRFDDDNSPSFIQIRSVAKKHPKTWVHYIAAEEEDWDYAPLVLAPDDRSYKSQYLNNGPQRIGRKYKKVRFMAYTDETFKTREAIQHESGILGPLLYGEVGDTLLIIFKNQASRPYNIYPHGITDVRPLYSRRLPKGVKHLKDFPILPGEIFKYKWTVTVEDGPTKSDPRCLTRYYSSFVNMERDLASGLIGPLLICYKESVDQRGNQIMSDKRNVILFSVFDENRSWYLTENIQRFLPNPAGVQLEDPEFQASNIMHSINGYVFDSLQLSVCLHEVAYWYILSIGAQTDFLSVFFSGYTFKHKMVYEDTLTLFPFSGETVFMSMENPGLWILGCHNSDFRNRGMTALLKVSSCDKNTGDYYEDSYEDISAYLLSKNNAIEPRSFSQNSRHPSTRQKQFNATTIPENDIEKTDPWFAHRTPMPKCQNVSSSDLLMLLRQSPTPHGLSLSDLQEAKYETFSDDPSPGAIDSNNSLSEMTHFRPQLHHSGDMVFTPESGLQLRLNEKLGTTAATELKKLDFKVSSTSNNLISTIPSDNLAAGTDNTSTLQSDQEEIDYDDTISVEMKKEDFDIYDEDENQSPRSFQKKTRHYFIAAVERLWDYGMSSSPHVLRNRAQSGSVPQFKKVVFQEFTDGSFTQPLYRGELNEHLGLLGPYIRAEVEDNIMVTFRNQASRPYSFYSSLISYEEDQRQGAEPRKNFVKPNETKTYFWKVQHHMAPTKDEFDCKAWAYFSDVDLEKDVHSGLIGPLLVCHTNTLNPAHGRQVTVQEFALFFTIFDETKSWYFTENMERNCRAPCNIQMEDPTFKENYRFHAINGYIMDTLPGLVMAQDQRIRWYLLSMGSNENIHSIHFSGHVFTVRKKEEYKMALYNLYPGVFETVEMLPSKAGIWRVECLIGEHLHAGMSTLFLVYSNKCQTPLGMASGHIRDFQITASGQYGQWAPKLARLHYSGSINAWSTKEPFSWIKVDLLAPMIIHGIKTQGARQKFSSLYISQFIIMYSLDGKKWQTYRGNSTGTLMVFFGNVDSSGIKHNIFNPPIIARYIRLHPTHYSIRSTLRMELMGCDLNSCSMPLGMESKAISDAQITASSYFTNMFATWSPSKARLHLQGRSNAWRPQVNNPKEWLQVDFQKTMKVTGVTTQGVKSLLTSMYVKEFLISSSQDGHQWTLFFQNGKVKVFQGNQDSFTPVVNSLDPPLLTRYLRIHPQSWVHQIALRMEVLGCEAQDLYLVPRGSGGGGSGGGGSGGGGSGGGGSGGGGSGGGGSGGGGSLSCRPPMVKLVCPADNLRAEGLECTKTCQNYDLECMSMGCVSGCLCPPGMVRHENRCVALERCPCFHQGKEYAPGETVKIGCNTCVCRDRKWNCTDHVCDATCSTIGMAHYLTFDGLKYLFPGECQYVLVQDYCGSNPGTFRILVGNKGCSHPSVKCKKRVTILVEGGEIELFDGEVNVKRPMKDETHFEVVESGRYIILLLGKALSVVWDRHLSISVVLKQTYQEKVCGLCGNFDGIQNNDLTSSNLQVEEDPVDFGNSWKVSSQCADTRKVPLDSSPATCHNNIMKQTMVDSSCRILTSDVFQDCNKLVDPEPYLDVCIYDTCSCESIGDCACFCDTIAAYAHVCAQHGKVVTWRTATLCPQSCEERNLRENGYECEWRYNSCAPACQVTCQHPEPLACPVQCVEGCHAHCPPGKILDELLQTCVDPEDCPVCEVAGRRFASGKKVTLNPSDPEHCQICHCDVVNLTCEACQEPGGLVVPPTDAPVSPTTLYVEDISEPPLHDF

SEQ ID NO: 11 - protein, 2138 aa, Artificial Sequence
  scFVIII/D'D3-50
ATRRYYLGAVELSWDYMQSDLGELPVDARFPPRVPKSFPFNTSVVYKKTLFVEFTDHLFNIAKPRPPWMGLLGPTIQAEVYDTVVITLKNMASHPVSLHAVGVSYWKASEGAEYDDQTSQREKEDDKVFPGGSHTYVWQVLKENGPMASDPLCLTYSYLSHVDLVKDLNSGLIGALLVCREGSLAKEKTQTLHKFILLFAVFDEGKSWHSETKNSLMQDRDAASARAWPKMHTVNGYVNRSLPGLIGCHRKSVYWHVIGMGTTPEVHSIFLEGHTFLVRNHRQASLEISPITFLTAQTLLMDLGQFLLFCHISSHQHDGMEAYVKVDSCPEEPQLRMKNNEEAEDYDDDLTDSEMDVVRFDDDNSPSFIQIRSVAKKHPKTWVHYIAAEEEDWDYAPLVLAPDDRSYKSQYLNNGPQRIGRKYKKVRFMAYTDETFKTREAIQHESGILGPLLYGEVGDTLLIIFKNQASRPYNIYPHGITDVRPLYSRRLPKGVKHLKDFPILPGEIFKYKWTVTVEDGPTKSDPRCLTRYYSSFVNMERDLASGLIGPLLICYKESVDQRGNQIMSDKRNVILFSVFDENRSWYLTENIQRFLPNPAGVQLEDPEFQASNIMHSINGYVFDSLQLSVCLHEVAYWYILSIGAQTDFLSVFFSGYTFKHKMVYEDTLTLFPFSGETVFMSMENPGLWILGCHNSDFRNRGMTALLKVSSCDKNTGDYYEDSYEDISAYLLSKNNAIEPRSFSQNSRHPSTRQKQFNATTIPENDIEKTDPWFAHRTPMPKCQNVSSSDLLMLLRQSPTPHGLSLSDLQEAKYETFSDDPSPGAIDSNNSLSEMTHFRPQLHHSGDMVFTPESGLQLRLNEKLGTTAATELKKLDFKVSSTSNNLISTIPSDNLAAGTDNTSTLQSDQEEIDYDDTISVEMKKEDFDIYDEDENQSPRSFQKKTRHYFIAAVERLWDYGMSSSPHVLRNRAQSGSVPQFKKVVFQEFTDGSFTQPLYRGELNEHLGLLGPYIRAEVEDNIMVTFRNQASRPYSFYSSLISYEEDQRQGAEPRKNFVKPNETKTYFWKVQHHMAPTKDEFDCKAWAYFSDVDLEKDVHSGLIGPLLVCHTNTLNPAHGRQVTVQEFALFFTIFDETKSWYFTENMERNCRAPCNIQMEDPTFKENYRFHAINGYIMDTLPGLVMAQDQRIRWYLLSMGSNENIHSIHFSGHVFTVRKKEEYKMALYNLYPGVFETVEMLPSKAGIWRVECLIGEHLHAGMSTLFLVYSNKCQTPLGMASGHIRDFQITASGQYGQWAPKLARLHYSGSINAWSTKEPFSWIKVDLLAPMIIHGIKTQGARQKFSSLYISQFIIMYSLDGKKWQTYRGNSTGTLMVFFGNVDSSGIKHNIFNPPIIARYIRLHPTHYSIRSTLRMELMGCDLNSCSMPLGMESKAISDAQITASSYFTNMFATWSPSKARLHLQGRSNAWRPQVNNPKEWLQVDFQKTMKVTGVTTQGVKSLLTSMYVKEFLISSSQDGHQWTLFFQNGKVKVFQGNQDSFTPVVNSLDPPLLTRYLRIHPQSWVHQIALRMEVLGCEAQDLYLVPRGSGGGGSGGGGSGGGGSGGGGSGGGGSGGGGSGGGGSGGGGSGGGGSLSCRPPMVKLVCPADNLRAEGLECTKTCQNYDLECMSMGCVSGCLCPPGMVRHENRCVALERCPCFHQGKEYAPGETVKIGCNTCVCRDRKWNCTDHVCDATCSTIGMAHYLTFDGLKYLFPGECQYVLVQDYCGSNPGTFRILVGNKGCSHPSVKCKKRVTILVEGGEIELFDGEVNVKRPMKDETHFEVVESGRYIILLLGKALSVVWDRHLSISVVLKQTYQEKVCGLCGNFDGIQNNDLTSSNLQVEEDPVDFGNSWKVSSQCADTRKVPLDSSPATCHNNIMKQTMVDSSCRILTSDVFQDCNKLVDPEPYLDVCIYDTCSCESIGDCACFCDTIAAYAHVCAQHGKVVTWRTATLCPQSCEERNLRENGYECEWRYNSCAPACQVTCQHPEPLACPVQCVEGCHAHCPPGKILDELLQTCVDPEDCPVCEVAGRRFASGKKVTLNPSDPEHCQICHCDVVNLTCEACQEPGGLVVPPTDAPVSPTTLYVEDISEPPLHDF

SEQ ID NO: 12 - protein, 2148 aa, Artificial Sequence
  scFVIII/D'D3-60
ATRRYYLGAVELSWDYMQSDLGELPVDARFPPRVPKSFPFNTSVVYKKTLFVEFTDHLFNIAKPRPPWMGLLGPTIQAEVYDTVVITLKNMASHPVSLHAVGVSYWKASEGAEYDDQTSQREKEDDKVFPGGSHTYVWQVLKENGPMASDPLCLTYSYLSHVDLVKDLNSGLIGALLVCREGSLAKEKTQTLHKFILLFAVFDEGKSWHSETKNSLMQDRDAASARAWPKMHTVNGYVNRSLPGLIGCHRKSVYWHVIGMGTTPEVHSIFLEGHTFLVRNHRQASLEISPITFLTAQTLLMDLGQFLLFCHISSHQHDGMEAYVKVDSCPEEPQLRMKNNEEAEDYDDDLTDSEMDVVRFDDDNSPSFIQIRSVAKKHPKTWVHYIAAEEEDWDYAPLVLAPDDRSYKSQYLNNGPQRIGRKYKKVRFMAYTDETFKTREAIQHESGILGPLLYGEVGDTLLIIFKNQASRPYNIYPHGITDVRPLYSRRLPKGVKHLKDFPILPGEIFKYKWTVTVEDGPTKSDPRCLTRYYSSFVNMERDLASGLIGPLLICYKESVDQRGNQIMSDKRNVILFSVFDENRSWYLTENIQRFLPNPAGVQLEDPEFQASNIMHSINGYVFDSLQLSVCLHEVAYWYILSIGAQTDFLSVFFSGYTFKHKMVYEDTLTLFPFSGETVFMSMENPGLWILGCHNSDFRNRGMTALLKVSSCDKNTGDYYEDSYEDISAYLLSKNNAIEPRSFSQNSRHPSTRQKQFNATTIPENDIEKTDPWFAHRTPMPKCQNVSSSDLLMLLRQSPTPHGLSLSDLQEAKYETFSDDPSPGAIDSNNSLSEMTHFRPQLHHSGDMVFTPESGLQLRLNEKLGTTAATELKKLDFKVSSTSNNLISTIPSDNLAAGTDNTSTLQSDQEEIDYDDTISVEMKKEDFDIYDEDENQSPRSFQKKTRHYFIAAVERLWDYGMSSSPHVLRNRAQSGSVPQFKKVVFQEFTDGSFTQPLYRGELNEHLGLLGPYIRAEVEDNIMVTFRNQASRPYSFYSSLISYEEDQRQGAEPRKNFVKPNETKTYFWKVQHHMAPTKDEFDCKAWAYFSDVDLEKDVHSGLIGPLLVCHTNTLNPAHGRQVTVQEFALFFTIFDETKSWYFTENMERNCRAPCNIQMEDPTFKENYRFHAINGYIMDTLPGLVMAQDQRIRWYLLSMGSNENIHSIHFSGHVFTVRKKEEYKMALYNLYPGVFETVEMLPSKAGIWRVECLIGEHLHAGMSTLFLVYSNKCQTPLGMASGHIRDFQITASGQYGQWAPKLARLHYSGSINAWSTKEPFSWIKVDLLAPMIIHGIKTQGARQKFSSLYISQFIIMYSLDGKKWQTYRGNSTGTLMVFFGNVDSSGIKHNIFNPPIIARYIRLHPTHYSIRSTLRMELMGCDLNSCSMPLGMESKAISDAQITASSYFTNMFATWSPSKARLHLQGRSNAWRPQVNNPKEWLQVDFQKTMKVTGVTTQGVKSLLTSMYVKEFLISSSQDGHQWTLFFQNGKVKVFQGNQDSFTPVVNSLDPPLLTRYLRIHPQSWVHQIALRMEVLGCEAQDLYLVPRGSGGGGSGGGGSGGGGSGGGGSGGGGSGGGGSGGGGSGGGGSGGGGSGGGGSGGGGSLSCRPPMVKLVCPADNLRAEGLECTKTCQNYDLECMSMGCVSGCLCPPGMVRHENRCVALERCPCFHQGKEYAPGETVKIGCNTCVCRDRKWNCTDHVCDATCSTIGMAHYLTFDGLKYLFPGECQYVLVQDYCGSNPGTFRILVGNKGCSHPSVKCKKRVTILVEGGEIELFDGEVNVKRPMKDETHFEVVESGRYIILLLGKALSVVWDRHLSISVVLKQTYQEKVCGLCGNFDGIQNNDLTSSNLQVEEDPVDFGNSWKVSSQCADTRKVPLDSSPATCHNNIMKQTMVDSSCRILTSDVFQDCNKLVDPEPYLDVCIYDTCSCESIGDCACFCDTIAAYAHVCAQHGKVVTWRTATLCPQSCEERNLRENGYECEWRYNSCAPACQVTCQHPEPLACPVQCVEGCHAHCPPGKILDELLQTCVDPEDCPVCEVAGRRFASGKKVTLNPSDPEHCQICHCDVVNLTCEACQEPGGLVVPPTDAPVSPTTLYVEDISEPPLHDF

SEQ ID NO: 13 - protein, 2178 aa, Artificial Sequence
  scFVIII/D'D3-90
ATRRYYLGAVELSWDYMQSDLGELPVDARFPPRVPKSFPFNTSVVYKKTLFVEFTDHLFNIAKPRPPWMGLLGPTIQAEVYDTVVITLKNMASHPVSLHAVGVSYWKASEGAEYDDQTSQREKEDDKVFPGGSHTYVWQVLKENGPMASDPLCLTYSYLSHVDLVKDLNSGLIGALLVCREGSLAKEKTQTLHKFILLFAVFDEGKSWHSETKNSLMQDRDAASARAWPKMHTVNGYVNRSLPGLIGCHRKSVYWHVIGMGTTPEVHSIFLEGHTFLVRNHRQASLEISPITFLTAQTLLMDLGQFLLFCHISSHQHDGMEAYVKVDSCPEEPQLRMKNNEEAEDYDDDLTDSEMDVVRFDDDNSPSFIQIRSVAKKHPKTWVHYIAAEEEDWDYAPLVLAPDDRSYKSQYLNNGPQRIGRKYKKVRFMAYTDETFKTREAIQHESGILGPLLYGEVGDTLLIIFKNQASRPYNIYPHGITDVRPLYSRRLPKGVKHLKDFPILPGEIFKYKWTVTVEDGPTKSDPRCLTRYYSSFVNMERDLASGLIGPLLICYKESVDQRGNQIMSDKRNVILFSVFDENRSWYLTENIQRFLPNPAGVQLEDPEFQASNIMHSINGYVFDSLQLSVCLHEVAYWYILSIGAQTDFLSVFFSGYTFKHKMVYEDTLTLFPFSGETVFMSMENPGLWILGCHNSDFRNRGMTALLKVSSCDKNTGDYYEDSYEDISAYLLSKNNAIEPRSFSQNSRHPSTRQKQFNATTIPENDIEKTDPWFAHRTPMPKCQNVSSSDLLMLLRQSPTPHGLSLSDLQEAKYETFSDDPSPGAIDSNNSLSEMTHFRPQLHHSGDMVFTPESGLQLRLNEKLGTTAATELKKLDFKVSSTSNNLISTIPSDNLAAGTDNTSTLQSDQEEIDYDDTISVEMKKEDFDIYDEDENQSPRSFQKKTRHYFIAAVERLWDYGMSSSPHVLRNRAQSGSVPQFKKVVFQEFTDGSFTQPLYRGELNEHLGLLGPYIRAEVEDNIMVTFRNQASRPYSFYSSLISYEEDQRQGAEPRKNFVKPNETKTYFWKVQHHMAPTKDEFDCKAWAYFSDVDLEKDVHSGLIGPLLVCHTNTLNPAHGRQVTVQEFALFFTIFDETKSWYFTENMERNCRAPCNIQMEDPTFKENYRFHAINGYIMDTLPGLVMAQDQRIRWYLLSMGSNENIHSIHFSGHVFTVRKKEEYKMALYNLYPGVFETVEMLPSKAGIWRVECLIGEHLHAGMSTLFLVYSNKCQTPLGMASGHIRDFQITASGQYGQWAPKLARLHYSGSINAWSTKEPFSWIKVDLLAPMIIHGIKTQGARQKFSSLYISQFIIMYSLDGKKWQTYRGNSTGTLMVFFGNVDSSGIKHNIFNPPIIARYIRLHPTHYSIRSTLRMELMGCDLNSCSMPLGMESKAISDAQITASSYFTNMFATWSPSKARLHLQGRSNAWRPQVNNPKEWLQVDFQKTMKVTGVTTQGVKSLLTSMYVKEFLISSSQDGHQWTLFFQNGKVKVFQGNQDSFTPVVNSLDPPLLTRYLRIHPQSWVHQIALRMEVLGCEAQDLYLVPRGSGGGGSGGGGSGGGGSGGGGSGGGGSGGGGSGGGGSGGGGSGGGGSGGGGSGGGGSGGGGSGGGGSGGGGSGGGGSGGGGSGGGGSLSCRPPMVKLVCPADNLRAEGLECTKTCQNYDLECMSMGCVSGCLCPPGMVRHENRCVALERCPCFHQGKEYAPGETVKIGCNTCVCRDRKWNCTDHVCDATCSTIGMAHYLTFDGLKYLFPGECQYVLVQDYCGSNPGTFRILVGNKGCSHPSVKCKKRVTILVEGGEIELFDGEVNVKRPMKDETHFEVVESGRYIILLLGKALSVVWDRHLSISVVLKQTYQEKVCGLCGNFDGIQNNDLTSSNLQVEEDPVDFGNSWKVSSQCADTRKVPLDSSPATCHNNIMKQTMVDSSCRILTSDVFQDCNKLVDPEPYLDVCIYDTCSCESIGDCACFCDTIAAYAHVCAQHGKVVTWRTATLCPQSCEERNLRENGYECEWRYNSCAPACQVTCQHPEPLACPVQCVEGCHAHCPPGKILDELLQTCVDPEDCPVCEVAGRRFASGKKVTLNPSDPEHCQICHCDVVNLTCEACQEPGGLVVPPTDAPVSPTTLYVEDISEPPLHDF

SEQ ID NO: 14 - protein, 2208 aa, Artificial Sequence
  scFVIII/D'D3-120
ATRRYYLGAVELSWDYMQSDLGELPVDARFPPRVPKSFPFNTSVVYKKTLFVEFTDHLFNIAKPRPPWMGLLGPTIQAEVYDTVVITLKNMASHPVSLHAVGVSYWKASEGAEYDDQTSQREKEDDKVFPGGSHTYVWQVLKENGPMASDPLCLTYSYLSHVDLVKDLNSGLIGALLVCREGSLAKEKTQTLHKFILLFAVFDEGKSWHSETKNSLMQDRDAASARAWPKMHTVNGYVNRSLPGLIGCHRKSVYWHVIGMGTTPEVHSIFLEGHTFLVRNHRQASLEISPITFLTAQTLLMDLGQFLLFCHISSHQHDGMEAYVKVDSCPEEPQLRMKNNEEAEDYDDDLTDSEMDVVRFDDDNSPSFIQIRSVAKKHPKTWVHYIAAEEEDWDYAPLVLAPDDRSYKSQYLNNGPQRIGRKYKKVRFMAYTDETFKTREAIQHESGILGPLLYGEVGDTLLIIFKNQASRPYNIYPHGITDVRPLYSRRLPKGVKHLKDFPILPGEIFKYKWTVTVEDGPTKSDPRCLTRYYSSFVNMERDLASGLIGPLLICYKESVDQRGNQIMSDKRNVILFSVFDENRSWYLTENIQRFLPNPAGVQLEDPEFQASNIMHSINGYVFDSLQLSVCLHEVAYWYILSIGAQTDFLSVFFSGYTFKHKMVYEDTLTLFPFSGETVFMSMENPGLWILGCHNSDFRNRGMTALLKVSSCDKNTGDYYEDSYEDISAYLLSKNNAIEPRSFSQNSRHPSTRQKQFNATTIPENDIEKTDPWFAHRTPMPKCQNVSSSDLLMLLRQSPTPHGLSLSDLQEAKYETFSDDPSPGAIDSNNSLSEMTHFRPQLHHSGDMVFTPESGLQLRLNEKLGTTAATELKKLDFKVSSTSNNLISTIPSDNLAAGTDNTSTLQSDQEEIDYDDTISVEMKKEDFDIYDEDENQSPRSFQKKTRHYFIAAVERLWDYGMSSSPHVLRNRAQSGSVPQFKKVVFQEFTDGSFTQPLYRGELNEHLGLLGPYIRAEVEDNIMVTFRNQASRPYSFYSSLISYEEDQRQGAEPRKNFVKPNETKTYFWKVQHHMAPTKDEFDCKAWAYFSDVDLEKDVHSGLIGPLLVCHTNTLNPAHGRQVTVQEFALFFTIFDETKSWYFTENMERNCRAPCNIQMEDPTFKENYRFHAINGYIMDTLPGLVMAQDQRIRWYLLSMGSNENIHSIHFSGHVFTVRKKEEYKMALYNLYPGVFETVEMLPSKAGIWRVECLIGEHLHAGMSTLFLVYSNKCQTPLGMASGHIRDFQITASGQYGQWAPKLARLHYSGSINAWSTKEPFSWIKVDLLAPMIIHGIKTQGARQKFSSLYISQFIIMYSLDGKKWQTYRGNSTGTLMVFFGNVDSSGIKHNIFNPPIIARYIRLHPTHYSIRSTLRMELMGCDLNSCSMPLGMESKAISDAQITASSYFTNMFATWSPSKARLHLQGRSNAWRPQVNNPKEWLQVDFQKTMKVTGVTTQGVKSLLTSMYVKEFLISSSQDGHQWTLFFQNGKVKVFQGNQDSFTPVVNSLDPPLLTRYLRIHPQSWVHQIALRMEVLGCEAQDLYLVPRGSGGGGSGGGGSGGGGSGGGGSGGGGSGGGGSGGGGSGGGGSGGGGSGGGGSGGGGSGGGGSGGGGSGGGGSGGGGSGGGGSGGGGSGGGGSGGGGSGGGGSGGGGSGGGGSGGGGSLSCRPPMVKLVCPADNLRAEGLECTKTCQNYDLECMSMGCVSGCLCPPGMVRHENRCVALERCPCFHQGKEYAPGETVKIGCNTCVCRDRKWNCTDHVCDATCSTIGMAHYLTFDGLKYLFPGECQYVLVQDYCGSNPGTFRILVGNKGCSHPSVKCKKRVTILVEGGEIELFDGEVNVKRPMKDETHFEVVESGRYIILLLGKALSVVWDRHLSISVVLKQTYQEKVCGLCGNFDGIQNNDLTSSNLQVEEDPVDFGNSWKVSSQCADTRKVPLDSSPATCHNNIMKQTMVDSSCRILTSDVFQDCNKLVDPEPYLDVCIYDTCSCESIGDCACFCDTIAAYAHVCAQHGKVVTWRTATLCPQSCEERNLRENGYECEWRYNSCAPACQVTCQHPEPLACPVQCVEGCHAHCPPGKILDELLQTCVDPEDCPVCEVAGRRFASGKKVTLNPSDPEHCQICHCDVVNLTCEACQEPGGLVVPPTDAPVSPTTLYVEDISEPPLHDF

SEQ ID NO: 15 - protein, 2208 aa, Artificial Sequence
  scFVIII/D'D3-120-TH1
ATRRYYLGAVELSWDYMQSDLGELPVDARFPPRVPKSFPFNTSVVYKKTLFVEFTDHLFNIAKPRPPWMGLLGPTIQAEVYDTVVITLKNMASHPVSLHAVGVSYWKASEGAEYDDQTSQREKEDDKVFPGGSHTYVWQVLKENGPMASDPLCLTYSYLSHVDLVKDLNSGLIGALLVCREGSLAKEKTQTLHKFILLFAVFDEGKSWHSETKNSLMQDRDAASARAWPKMHTVNGYVNRSLPGLIGCHRKSVYWHVIGMGTTPEVHSIFLEGHTFLVRNHRQASLEISPITFLTAQTLLMDLGQFLLFCHISSHQHDGMEAYVKVDSCPEEPQLRMKNNEEAEDYDDDLTDSEMDVVRFDDDNSPSFIQIRSVAKKHPKTWVHYIAAEEEDWDYAPLVLAPDDRSYKSQYLNNGPQRIGRKYKKVRFMAYTDETFKTREAIQHESGILGPLLYGEVGDTLLIIFKNQASRPYNIYPHGITDVRPLYSRRLPKGVKHLKDFPILPGEIFKYKWTVTVEDGPTKSDPRCLTRYYSSFVNMERDLASGLIGPLLICYKESVDQRGNQIMSDKRNVILFSVFDENRSWYLTENIQRFLPNPAGVQLEDPEFQASNIMHSINGYVFDSLQLSVCLHEVAYWYILSIGAQTDFLSVFFSGYTFKHKMVYEDTLTLFPFSGETVFMSMENPGLWILGCHNSDFRNRGMTALLKVSSCDKNTGDYYEDSYEDISAYLLSKNNAIEPRSFSQNSRHPSTRQKQFNATTIPENDIEKTDPWFAHRTPMPKCQNVSSSDLLMLLRQSPTPHGLSLSDLQEAKYETFSDDPSPGAIDSNNSLSEMTHFRPQLHHSGDMVFTPESGLQLRLNEKLGTTAATELKKLDFKVSSTSNNLISTIPSDNLAAGTDNTSTLQSDQEEIDYDDTISVEMKKEDFDIYDEDENQSPRSFQKKTRHYFIAAVERLWDYGMSSSPHVLRNRAQSGSVPQFKKVVFQEFTDGSFTQPLYRGELNEHLGLLGPYIRAEVEDNIMVTFRNQASRPYSFYSSLISYEEDQRQGAEPRKNFVKPNETKTYFWKVQHHMAPTKDEFDCKAWAYFSDVDLEKDVHSGLIGPLLVCHTNTLNPAHGRQVTVQEFALFFTIFDETKSWYFTENMERNCRAPCNIQMEDPTFKENYRFHAINGYIMDTLPGLVMAQDQRIRWYLLSMGSNENIHSIHFSGHVFTVRKKEEYKMALYNLYPGVFETVEMLPSKAGIWRVECLIGEHLHAGMSTLFLVYSNKCQTPLGMASGHIRDFQITASGQYGQWAPKLARLHYSGSINAWSTKEPFSWIKVDLLAPMIIHGIKTQGARQKFSSLYISQFIIMYSLDGKKWQTYRGNSTGTLMVFFGNVDSSGIKHNIFNPPIIARYIRLHPTHYSIRSTLRMELMGCDLNSCSMPLGMESKAISDAQITASSYFTNMFATWSPSKARLHLQGRSNAWRPQVNNPKEWLQVDFQKTMKVTGVTTQGVKSLLTSMYVKEFLISSSQDGHQWTLFFQNGKVKVFQGNQDSFTPVVNSLDPPLLTRYLRIHPQSWVHQIALRMEVLGCEAQDLYGGGSLVPRGSGGGGSGGGGSGGGGSGGGGSGGGGSGGGGSGGGGSGGGGSGGGGSGGGGSGGGGSGGGGSGGGGSGGGGSGGGGSGGGGSGGGGSGGGGSGGGGSGGGGSGGGGSGGGGGSLSCRPPMVKLVCPADNLRAEGLECTKTCQNYDLECMSMGCVSGCLCPPGMVRHENRCVALERCPCFHQGKEYAPGETVKIGCNTCVCRDRKWNCTDHVCDATCSTIGMAHYLTFDGLKYLFPGECQYVLVQDYCGSNPGTFRILVGNKGCSHPSVKCKKRVTILVEGGEIELFDGEVNVKRPMKDETHFEVVESGRYIILLLGKALSVVWDRHLSISVVLKQTYQEKVCGLCGNFDGIQNNDLTSSNLQVEEDPVDFGNSWKVSSQCADTRKVPLDSSPATCHNNIMKQTMVDSSCRILTSDVFQDCNKLVDPEPYLDVCIYDTCSCESIGDCACFCDTIAAYAHVCAQHGKVVTWRTATLCPQSCEERNLRENGYECEWRYNSCAPACQVTCQHPEPLACPVQCVEGCHAHCPPGKILDELLQTCVDPEDCPVCEVAGRRFASGKKVTLNPSDPEHCQICHCDVVNLTCEACQEPGGLVVPPTDAPVSPTTLYVEDISEPPLHDF

SEQ ID NO: 16 - protein, 2208 aa, Artificial Sequence
  scFVIII/D'D3-120-TH2
ATRRYYLGAVELSWDYMQSDLGELPVDARFPPRVPKSFPFNTSVVYKKTLFVEFTDHLFNIAKPRPPWMGLLGPTIQAEVYDTVVITLKNMASHPVSLHAVGVSYWKASEGAEYDDQTSQREKEDDKVFPGGSHTYVWQVLKENGPMASDPLCLTYSYLSHVDLVKDLNSGLIGALLVCREGSLAKEKTQTLHKFILLFAVFDEGKSWHSETKNSLMQDRDAASARAWPKMHTVNGYVNRSLPGLIGCHRKSVYWHVIGMGTTPEVHSIFLEGHTFLVRNHRQASLEISPITFLTAQTLLMDLGQFLLFCHISSHQHDGMEAYVKVDSCPEEPQLRMKNNEEAEDYDDDLTDSEMDVVRFDDDNSPSFIQIRSVAKKHPKTWVHYIAAEEEDWDYAPLVLAPDDRSYKSQYLNNGPQRIGRKYKKVRFMAYTDETFKTREAIQHESGILGPLLYGEVGDTLLIIFKNQASRPYNIYPHGITDVRPLYSRRLPKGVKHLKDFPILPGEIFKYKWTVTVEDGPTKSDPRCLTRYYSSFVNMERDLASGLIGPLLICYKESVDQRGNQIMSDKRNVILFSVFDENRSWYLTENIQRFLPNPAGVQLEDPEFQASNIMHSINGYVFDSLQLSVCLHEVAYWYILSIGAQTDFLSVFFSGYTFKHKMVYEDTLTLFPFSGETVFMSMENPGLWILGCHNSDFRNRGMTALLKVSSCDKNTGDYYEDSYEDISAYLLSKNNAIEPRSFSQNSRHPSTRQKQFNATTIPENDIEKTDPWFAHRTPMPKCQNVSSSDLLMLLRQSPTPHGLSLSDLQEAKYETFSDDPSPGAIDSNNSLSEMTHFRPQLHHSGDMVFTPESGLQLRLNEKLGTTAATELKKLDFKVSSTSNNLISTIPSDNLAAGTDNTSTLQSDQEEIDYDDTISVEMKKEDFDIYDEDENQSPRSFQKKTRHYFIAAVERLWDYGMSSSPHVLRNRAQSGSVPQFKKVVFQEFTDGSFTQPLYRGELNEHLGLLGPYIRAEVEDNIMVTFRNQASRPYSFYSSLISYEEDQRQGAEPRKNFVKPNETKTYFWKVQHHMAPTKDEFDCKAWAYFSDVDLEKDVHSGLIGPLLVCHTNTLNPAHGRQVTVQEFALFFTIFDETKSWYFTENMERNCRAPCNIQMEDPTFKENYRFHAINGYIMDTLPGLVMAQDQRIRWYLLSMGSNENIHSIHFSGHVFTVRKKEEYKMALYNLYPGVFETVEMLPSKAGIWRVECLIGEHLHAGMSTLFLVYSNKCQTPLGMASGHIRDFQITASGQYGQWAPKLARLHYSGSINAWSTKEPFSWIKVDLLAPMIIHGIKTQGARQKFSSLYISQFIIMYSLDGKKWQTYRGNSTGTLMVFFGNVDSSGIKHNIFNPPIIARYIRLHPTHYSIRSTLRMELMGCDLNSCSMPLGMESKAISDAQITASSYFTNMFATWSPSKARLHLQGRSNAWRPQVNNPKEWLQVDFQKTMKVTGVTTQGVKSLLTSMYVKEFLISSSQDGHQWTLFFQNGKVKVFQGNQDSFTPVVNSLDPPLLTRYLRIHPQSWVHQIALRMEVLGCEAQDLYLSKNNAIEPRGGGGSGGGGSGGGGSGGGGSGGGGSGGGGSGGGGSGGGGSGGGGSGGGGSGGGGSGGGGSGGGGSGGGGSGGGGSGGGGSGGGGSGGGGSGGGGSGGGGSGGGGSGGGGGSLSCRPPMVKLVCPADNLRAEGLECTKTCQNYDLECMSMGCVSGCLCPPGMVRHENRCVALERCPCFHQGKEYAPGETVKIGCNTCVCRDRKWNCTDHVCDATCSTIGMAHYLTFDGLKYLFPGECQYVLVQDYCGSNPGTFRILVGNKGCSHPSVKCKKRVTILVEGGEIELFDGEVNVKRPMKDETHFEVVESGRYIILLLGKALSVVWDRHLSISVVLKQTYQEKVCGLCGNFDGIQNNDLTSSNLQVEEDPVDFGNSWKVSSQCADTRKVPLDSSPATCHNNIMKQTMVDSSCRILTSDVFQDCNKLVDPEPYLDVCIYDTCSCESIGDCACFCDTIAAYAHVCAQHGKVVTWRTATLCPQSCEERNLRENGYECEWRYNSCAPACQVTCQHPEPLACPVQCVEGCHAHCPPGKILDELLQTCVDPEDCPVCEVAGRRFASGKKVTLNPSDPEHCQICHCDVVNLTCEACQEPGGLVVPPTDAPVSPTTLYVEDISEPPLHDF

SEQ ID NO: 17 - protein, 2388 aa, Artificial Sequence
  scFVIII/D'D3-300
ATRRYYLGAVELSWDYMQSDLGELPVDARFPPRVPKSFPFNTSVVYKKTLFVEFTDHLFNIAKPRPPWMGLLGPTIQAEVYDTVVITLKNMASHPVSLHAVGVSYWKASEGAEYDDQTSQREKEDDKVFPGGSHTYVWQVLKENGPMASDPLCLTYSYLSHVDLVKDLNSGLIGALLVCREGSLAKEKTQTLHKFILLFAVFDEGKSWHSETKNSLMQDRDAASARAWPKMHTVNGYVNRSLPGLIGCHRKSVYWHVIGMGTTPEVHSIFLEGHTFLVRNHRQASLEISPITFLTAQTLLMDLGQFLLFCHISSHQHDGMEAYVKVDSCPEEPQLRMKNNEEAEDYDDDLTDSEMDVVRFDDDNSPSFIQIRSVAKKHPKTWVHYIAAEEEDWDYAPLVLAPDDRSYKSQYLNNGPQRIGRKYKKVRFMAYTDETFKTREAIQHESGILGPLLYGEVGDTLLIIFKNQASRPYNIYPHGITDVRPLYSRRLPKGVKHLKDFPILPGEIFKYKWTVTVEDGPTKSDPRCLTRYYSSFVNMERDLASGLIGPLLICYKESVDQRGNQIMSDKRNVILFSVFDENRSWYLTENIQRFLPNPAGVQLEDPEFQASNIMHSINGYVFDSLQLSVCLHEVAYWYILSIGAQTDFLSVFFSGYTFKHKMVYEDTLTLFPFSGETVFMSMENPGLWILGCHNSDFRNRGMTALLKVSSCDKNTGDYYEDSYEDISAYLLSKNNAIEPRSFSQNSRHPSTRQKQFNATTIPENDIEKTDPWFAHRTPMPKCQNVSSSDLLMLLRQSPTPHGLSLSDLQEAKYETFSDDPSPGAIDSNNSLSEMTHFRPQLHHSGDMVFTPESGLQLRLNEKLGTTAATELKKLDFKVSSTSNNLISTIPSDNLAAGTDNTSTLQSDQEEIDYDDTISVEMKKEDFDIYDEDENQSPRSFQKKTRHYFIAAVERLWDYGMSSSPHVLRNRAQSGSVPQFKKVVFQEFTDGSFTQPLYRGELNEHLGLLGPYIRAEVEDNIMVTFRNQASRPYSFYSSLISYEEDQRQGAEPRKNFVKPNETKTYFWKVQHHMAPTKDEFDCKAWAYFSDVDLEKDVHSGLIGPLLVCHTNTLNPAHGRQVTVQEFALFFTIFDETKSWYFTENMERNCRAPCNIQMEDPTFKENYRFHAINGYIMDTLPGLVMAQDQRIRWYLLSMGSNENIHSIHFSGHVFTVRKKEEYKMALYNLYPGVFETVEMLPSKAGIWRVECLIGEHLHAGMSTLFLVYSNKCQTPLGMASGHIRDFQITASGQYGQWAPKLARLHYSGSINAWSTKEPFSWIKVDLLAPMIIHGIKTQGARQKFSSLYISQFIIMYSLDGKKWQTYRGNSTGTLMVFFGNVDSSGIKHNIFNPPIIARYIRLHPTHYSIRSTLRMELMGCDLNSCSMPLGMESKAISDAQITASSYFTNMFATWSPSKARLHLQGRSNAWRPQVNNPKEWLQVDFQKTMKVTGVTTQGVKSLLTSMYVKEFLISSSQDGHQWTLFFQNGKVKVFQGNQDSFTPVVNSLDPPLLTRYLRIHPQSWVHQIALRMEVLGCEAQDLYLVPRGSGGGGSGGGGSGGGGSGGGGSGGGGSGGGGSGGGGSGGGGSGGGGSGGGGSGGGGSGGGGSGGGGSGGGGSGGGGSGGGGSGGGGSGGGGSGGGGSGGGGSGGGGSGGGGSGGGGSGGGGSGGGGSGGGGSGGGGSGGGGSGGGGSGGGGSGGGGSGGGGSGGGGSGGGGSGGGGSGGGGSGGGGSGGGGSGGGGSGGGGSGGGGSGGGGSGGGGSGGGGSGGGGSGGGGSGGGGSGGGGSGGGGSGGGGSGGGGSGGGGSGGGGSGGGGSGGGGSGGGGSGGGGSGGGGSGGGGSLSCRPPMVKLVCPADNLRAEGLECTKTCQNYDLECMSMGCVSGCLCPPGMVRHENRCVALERCPCFHQGKEYAPGETVKIGCNTCVCRDRKWNCTDHVCDATCSTIGMAHYLTFDGLKYLFPGECQYVLVQDYCGSNPGTFRILVGNKGCSHPSVKCKKRVTILVEGGEIELFDGEVNVKRPMKDETHFEVVESGRYIILLLGKALSVVWDRHLSISVVLKQTYQEKVCGLCGNFDGIQNNDLTSSNLQVEEDPVDFGNSWKVSSQCADTRKVPLDSSPATCHNNIMKQTMVDSSCRILTSDVFQDCNKLVDPEPYLDVCIYDTCSCESIGDCACFCDTIAAYAHVCAQHGKVVTWRTATLCPQSCEERNLRENGYECEWRYNSCAPACQVTCQHPEPLACPVQCVEGCHAHCPPGKILDELLQTCVDPEDCPVCEVAGRRFASGKKVTLNPSDPEHCQICHCDVVNLTCEACQEPGGLVVPPTDAPVSPTTLYVEDISEPPLHDF

SEQ ID NO: 18 - protein, 2745 aa, Artificial Sequence
  scFVIII/D'D3/D'D3-120
ATRRYYLGAVELSWDYMQSDLGELPVDARFPPRVPKSFPFNTSVVYKKTLFVEFTDHLFNIAKPRPPWMGLLGPTIQAEVYDTVVITLKNMASHPVSLHAVGVSYWKASEGAEYDDQTSQREKEDDKVFPGGSHTYVWQVLKENGPMASDPLCLTYSYLSHVDLVKDLNSGLIGALLVCREGSLAKEKTQTLHKFILLFAVFDEGKSWHSETKNSLMQDRDAASARAWPKMHTVNGYVNRSLPGLIGCHRKSVYWHVIGMGTTPEVHSIFLEGHTFLVRNHRQASLEISPITFLTAQTLLMDLGQFLLFCHISSHQHDGMEAYVKVDSCPEEPQLRMKNNEEAEDYDDDLTDSEMDVVRFDDDNSPSFIQIRSVAKKHPKTWVHYIAAEEEDWDYAPLVLAPDDRSYKSQYLNNGPQRIGRKYKKVRFMAYTDETFKTREAIQHESGILGPLLYGEVGDTLLIIFKNQASRPYNIYPHGITDVRPLYSRRLPKGVKHLKDFPILPGEIFKYKWTVTVEDGPTKSDPRCLTRYYSSFVNMERDLASGLIGPLLICYKESVDQRGNQIMSDKRNVILFSVFDENRSWYLTENIQRFLPNPAGVQLEDPEFQASNIMHSINGYVFDSLQLSVCLHEVAYWYILSIGAQTDFLSVFFSGYTFKHKMVYEDTLTLFPFSGETVFMSMENPGLWILGCHNSDFRNRGMTALLKVSSCDKNTGDYYEDSYEDISAYLLSKNNAIEPRSFSQNSRHPSTRQKQFNATTIPENDIEKTDPWFAHRTPMPKCQNVSSSDLLMLLRQSPTPHGLSLSDLQEAKYETFSDDPSPGAIDSNNSLSEMTHFRPQLHHSGDMVFTPESGLQLRLNEKLGTTAATELKKLDFKVSSTSNNLISTIPSDNLAAGTDNTSTLQSDQEEIDYDDTISVEMKKEDFDIYDEDENQSPRSFQKKTRHYFIAAVERLWDYGMSSSPHVLRNRAQSGSVPQFKKVVFQEFTDGSFTQPLYRGELNEHLGLLGPYIRAEVEDNIMVTFRNQASRPYSFYSSLISYEEDQRQGAEPRKNFVKPNETKTYFWKVQHHMAPTKDEFDCKAWAYFSDVDLEKDVHSGLIGPLLVCHTNTLNPAHGRQVTVQEFALFFTIFDETKSWYFTENMERNCRAPCNIQMEDPTFKENYRFHAINGYIMDTLPGLVMAQDQRIRWYLLSMGSNENIHSIHFSGHVFTVRKKEEYKMALYNLYPGVFETVEMLPSKAGIWRVECLIGEHLHAGMSTLFLVYSNKCQTPLGMASGHIRDFQITASGQYGQWAPKLARLHYSGSINAWSTKEPFSWIKVDLLAPMIIHGIKTQGARQKFSSLYISQFIIMYSLDGKKWQTYRGNSTGTLMVFFGNVDSSGIKHNIFNPPIIARYIRLHPTHYSIRSTLRMELMGCDLNSCSMPLGMESKAISDAQITASSYFTNMFATWSPSKARLHLQGRSNAWRPQVNNPKEWLQVDFQKTMKVTGVTTQGVKSLLTSMYVKEFLISSSQDGHQWTLFFQNGKVKVFQGNQDSFTPVVNSLDPPLLTRYLRIHPQSWVHQIALRMEVLGCEAQDLYLVPRGSGGGGSGGGGSGGGGSGGGGSGGGGSGGGGSGGGGSGGGGSGGGGSGGGGSGGGGSGGGGSGGGGSGGGGSGGGGSGGGGSGGGGSGGGGSGGGGSGGGGSGGGGSGGGGSGGGGSLSCRPPMVKLVCPADNLRAEGLECTKTCQNYDLECMSMGCVSGCLCPPGMVRHENRCVALERCPCFHQGKEYAPGETVKIGCNTCVCRDRKWNCTDHVCDATCSTIGMAHYLTFDGLKYLFPGECQYVLVQDYCGSNPGTFRILVGNKGCSHPSVKCKKRVTILVEGGEIELFDGEVNVKRPMKDETHFEVVESGRYIILLLGKALSVVWDRHLSISVVLKQTYQEKVCGLCGNFDGIQNNDLTSSNLQVEEDPVDFGNSWKVSSQCADTRKVPLDSSPATCHNNIMKQTMVDSSCRILTSDVFQDCNKLVDPEPYLDVCIYDTCSCESIGDCACFCDTIAAYAHVCAQHGKVVTWRTATLCPQSCEERNLRENGYECEWRYNSCAPACQVTCQHPEPLACPVQCVEGCHAHCPPGKILDELLQTCVDPEDCPVCEVAGRRFASGKKVTLNPSDPEHCQICHCDVVNLTCEACQEPGGLVVPPTDAPVSPTTLYVEDISEPPLHDFGGGGSGGGGSGGGGSGGGGSGGGGSGGGGGSLSCRPPMVKLVCPADNLRAEGLECTKTCQNYDLECMSMGCVSGCLCPPGMVRHENRCVALERCPCFHQGKEYAPGETVKIGCNTCVCRDRKWNCTDHVCDATCSTIGMAHYLTFDGLKYLFPGECQYVLVQDYCGSNPGTFRILVGNKGCSHPSVKCKKRVTILVEGGEIELFDGEVNVKRPMKDETHFEVVESGRYIILLLGKALSVVWDRHLSISVVLKQTYQEKVCGLCGNFDGIQNNDLTSSNLQVEEDPVDFGNSWKVSSQCADTRKVPLDSSPATCHNNIMKQTMVDSSCRILTSDVFQDCNKLVDPEPYLDVCIYDTCSCESIGDCACFCDTIAAYAHVCAQHGKVVTWRTATLCPQSCEERNLRENGYECEWRYNSCAPACQVTCQHPEPLACPVQCVEGCHAHCPPGKILDELLQTCVDPEDCPVCEVAGRRFASGKKVTLNPSDPEHCQICHCDVVNLTCEACQEPGGLVVPPTDAPVSPTTLYVEDISEPPLHDF

SEQ ID NO: 19 - protein, 2949 aa, Artificial Sequence
  D'D3/scFVIII-120 of the complex of D'D3/scFVIII-120 and D'D3
AEGTRGRSSTARCSLFGSDFVNTFDGSMYSFAGYCSYLLAGGCQKRSFSIIGDFQNGKRVSLSVYLGEFFDIHLFVNGTVTQGDQRVSMPYASKGLYLETEAGYYKLSGEAYGFVARIDGSGNFQVLLSDRYFNKTCGLCGNFNIFAEDDFMTQEGTLTSDPYDFANSWALSSGEQWCERASPPSSSCNISSGEMQKGLWEQCQLLKSTSVFARCHPLVDPEPFVALCEKTLCECAGGLECACPALLEYARTCAQEGMVLYGWTDHSACSPVCPAGMEYRQCVSPCARTCQSLHINEMCQERCVDGCSCPEGQLLDEGLCVESTECPCVHSGKRYPPGTSLSRDCNTCICRNSQWICSNEECPGECLVTGQSHFKSFDNRYFTFSGICQYLLARDCQDHSFSIVIETVQCADDRDAVCTRSVTVRLPGLHNSLVKLKHGAGVAMDGQDVQLPLLKGDLRIQHTVTASVRLSYGEDLQMDWDGRGRLLVKLSPVYAGKTCGLCGNYNGNQGDDFLTPSGLAEPRVEDFGNAWKLHGDCQDLQKQHSDPCALNPRMTRFSEEACAVLTSPTFEACHRAVSPLPYLRNCRYDVCSCSDGRECLCGALASYAAACAGRGVRVAWREPGRCELNCPKGQVYLQCGTPCNLTCRSLSYPDEECNEACLEGCFCPPGLYMDERGDCVPKAQCPCYYDGEIFQPEDIFSDHHTMCYCEDGFMHCTMSGVPGSLLPDAVLSSPLSHRSKRSLSCRPPMVKLVCPADNLRAEGLECTKTCQNYDLECMSMGCVSGCLCPPGMVRHENRCVALERCPCFHQGKEYAPGETVKIGCNTCVCRDRKWNCTDHVCDATCSTIGMAHYLTFDGLKYLFPGECQYVLVQDYCGSNPGTFRILVGNKGCSHPSVKCKKRVTILVEGGEIELFDGEVNVKRPMKDETHFEVVESGRYIILLLGKALSVVWDRHLSISVVLKQTYQEKVCGLCGNFDGIQNNDLTSSNLQVEEDPVDFGNSWKVSSQCADTRKVPLDSSPATCHNNIMKQTMVDSSCRILTSDVFQDCNKLVDPEPYLDVCIYDTCSCESIGDCACFCDTIAAYAHVCAQHGKVVTWRTATLCPQSCEERNLRENGYECEWRYNSCAPACQVTCQHPEPLACPVQCVEGCHAHCPPGKILDELLQTCVDPEDCPVCEVAGRRFASGKKVTLNPSDPEHCQICHCDVVNLTCEACQEPGGLVVPPTDAPVSPTTLYVEDISEPPLHDFGGGGSGGGGSGGGGSGGGGSGGGGSGGGGSGGGGSGGGGSGGGGSGGGGSGGGGSGGGGSGGGGSGGGGSGGGGSGGGGSGGGGSGGGGSGGGGSGGGGSGGGGSGGGGSGGGSLVPRGSATRRYYLGAVELSWDYMQSDLGELPVDARFPPRVPKSFPFNTSVVYKKTLFVEFTDHLFNIAKPRPPWMGLLGPTIQAEVYDTVVITLKNMASHPVSLHAVGVSYWKASEGAEYDDQTSQREKEDDKVFPGGSHTYVWQVLKENGPMASDPLCLTYSYLSHVDLVKDLNSGLIGALLVCREGSLAKEKTQTLHKFILLFAVFDEGKSWHSETKNSLMQDRDAASARAWPKMHTVNGYVNRSLPGLIGCHRKSVYWHVIGMGTTPEVHSIFLEGHTFLVRNHRQASLEISPITFLTAQTLLMDLGQFLLFCHISSHQHDGMEAYVKVDSCPEEPQLRMKNNEEAEDYDDDLTDSEMDVVRFDDDNSPSFIQIRSVAKKHPKTWVHYIAAEEEDWDYAPLVLAPDDRSYKSQYLNNGPQRIGRKYKKVRFMAYTDETFKTREAIQHESGILGPLLYGEVGDTLLIIFKNQASRPYNIYPHGITDVRPLYSRRLPKGVKHLKDFPILPGEIFKYKWTVTVEDGPTKSDPRCLTRYYSSFVNMERDLASGLIGPLLICYKESVDQRGNQIMSDKRNVILFSVFDENRSWYLTENIQRFLPNPAGVQLEDPEFQASNIMHSINGYVFDSLQLSVCLHEVAYWYILSIGAQTDFLSVFFSGYTFKHKMVYEDTLTLFPFSGETVFMSMENPGLWILGCHNSDFRNRGMTALLKVSSCDKNTGDYYEDSYEDISAYLLSKNNAIEPRSFSQNSRHPSTRQKQFNATTIPENDIEKTDPWFAHRTPMPKCQNVSSSDLLMLLRQSPTPHGLSLSDLQEAKYETFSDDPSPGAIDSNNSLSEMTHFRPQLHHSGDMVFTPESGLQLRLNEKLGTTAATELKKLDFKVSSTSNNLISTIPSDNLAAGTDNTSTLQSDQEEIDYDDTISVEMKKEDFDIYDEDENQSPRSFQKKTRHYFIAAVERLWDYGMSSSPHVLRNRAQSGSVPQFKKVVFQEFTDGSFTQPLYRGELNEHLGLLGPYIRAEVEDNIMVTFRNQASRPYSFYSSLISYEEDQRQGAEPRKNFVKPNETKTYFWKVQHHMAPTKDEFDCKAWAYFSDVDLEKDVHSGLIGPLLVCHTNTLNPAHGRQVTVQEFALFFTIFDETKSWYFTENMERNCRAPCNIQMEDPTFKENYRFHAINGYIMDTLPGLVMAQDQRIRWYLLSMGSNENIHSIHFSGHVFTVRKKEEYKMALYNLYPGVFETVEMLPSKAGIWRVECLIGEHLHAGMSTLFLVYSNKCQTPLGMASGHIRDFQITASGQYGQWAPKLARLHYSGSINAWSTKEPFSWIKVDLLAPMIIHGIKTQGARQKFSSLYISQFIIMYSLDGKKWQTYRGNSTGTLMVFFGNVDSSGIKHNIFNPPIIARYIRLHPTHYSIRSTLRMELMGCDLNSCSMPLGMESKAISDAQITASSYFTNMFATWSPSKARLHLQGRSNAWRPQVNNPKEWLQVDFQKTMKVTGVTTQGVKSLLTSMYVKEFLISSSQDGHQWTLFFQNGKVKVFQGNQDSFTPVVNSLDPPLLTRYLRIHPQSWVHQIALRMEVLGCEAQDLY

SEQ ID NO: 20 - protein, 1248 aa, Artificial Sequence
  D'D3 of the complex of D'D3/scFVIII-120 and D'D3
AEGTRGRSSTARCSLFGSDFVNTFDGSMYSFAGYCSYLLAGGCQKRSFSIIGDFQNGKRVSLSVYLGEFFDIHLFVNGTVTQGDQRVSMPYASKGLYLETEAGYYKLSGEAYGFVARIDGSGNFQVLLSDRYFNKTCGLCGNFNIFAEDDFMTQEGTLTSDPYDFANSWALSSGEQWCERASPPSSSCNISSGEMQKGLWEQCQLLKSTSVFARCHPLVDPEPFVALCEKTLCECAGGLECACPALLEYARTCAQEGMVLYGWTDHSACSPVCPAGMEYRQCVSPCARTCQSLHINEMCQERCVDGCSCPEGQLLDEGLCVESTECPCVHSGKRYPPGTSLSRDCNTCICRNSQWICSNEECPGECLVTGQSHFKSFDNRYFTFSGICQYLLARDCQDHSFSIVIETVQCADDRDAVCTRSVTVRLPGLHNSLVKLKHGAGVAMDGQDVQLPLLKGDLRIQHTVTASVRLSYGEDLQMDWDGRGRLLVKLSPVYAGKTCGLCGNYNGNQGDDFLTPSGLAEPRVEDFGNAWKLHGDCQDLQKQHSDPCALNPRMTRFSEEACAVLTSPTFEACHRAVSPLPYLRNCRYDVCSCSDGRECLCGALASYAAACAGRGVRVAWREPGRCELNCPKGQVYLQCGTPCNLTCRSLSYPDEECNEACLEGCFCPPGLYMDERGDCVPKAQCPCYYDGEIFQPEDIFSDHHTMCYCEDGFMHCTMSGVPGSLLPDAVLSSPLSHRSKRSLSCRPPMVKLVCPADNLRAEGLECTKTCQNYDLECMSMGCVSGCLCPPGMVRHENRCVALERCPCFHQGKEYAPGETVKIGCNTCVCRDRKWNCTDHVCDATCSTIGMAHYLTFDGLKYLFPGECQYVLVQDYCGSNPGTFRILVGNKGCSHPSVKCKKRVTILVEGGEIELFDGEVNVKRPMKDETHFEVVESGRYIILLLGKALSVVWDRHLSISVVLKQTYQEKVCGLCGNFDGIQNNDLTSSNLQVEEDPVDFGNSWKVSSQCADTRKVPLDSSPATCHNNIMKQTMVDSSCRILTSDVFQDCNKLVDPEPYLDVCIYDTCSCESIGDCACFCDTIAAYAHVCAQHGKVVTWRTATLCPQSCEERNLRENGYECEWRYNSCAPACQVTCQHPEPLACPVQCVEGCHAHCPPGKILDELLQTCVDPEDCPVCEVAGRRFASGKKVTLNPSDPEHCQICHCDVVNLTCEACQEPGGLVVPPTDAPVSPTTLYVEDISEPPLHDF

SEQ ID NO: 21 - protein, 2465 aa, Artificial Sequence
  scFVIII/D'D3/Fc-120 of the complex of scFVIII/D'D3/Fc-120Fc and Fc
ATRRYYLGAVELSWDYMQSDLGELPVDARFPPRVPKSFPFNTSVVYKKTLFVEFTDHLFNIAKPRPPWMGLLGPTIQAEVYDTVVITLKNMASHPVSLHAVGVSYWKASEGAEYDDQTSQREKEDDKVFPGGSHTYVWQVLKENGPMASDPLCLTYSYLSHVDLVKDLNSGLIGALLVCREGSLAKEKTQTLHKFILLFAVFDEGKSWHSETKNSLMQDRDAASARAWPKMHTVNGYVNRSLPGLIGCHRKSVYWHVIGMGTTPEVHSIFLEGHTFLVRNHRQASLEISPITFLTAQTLLMDLGQFLLFCHISSHQHDGMEAYVKVDSCPEEPQLRMKNNEEAEDYDDDLTDSEMDVVRFDDDNSPSFIQIRSVAKKHPKTWVHYIAAEEEDWDYAPLVLAPDDRSYKSQYLNNGPQRIGRKYKKVRFMAYTDETFKTREAIQHESGILGPLLYGEVGDTLLIIFKNQASRPYNIYPHGITDVRPLYSRRLPKGVKHLKDFPILPGEIFKYKWTVTVEDGPTKSDPRCLTRYYSSFVNMERDLASGLIGPLLICYKESVDQRGNQIMSDKRNVILFSVFDENRSWYLTENIQRFLPNPAGVQLEDPEFQASNIMHSINGYVFDSLQLSVCLHEVAYWYILSIGAQTDFLSVFFSGYTFKHKMVYEDTLTLFPFSGETVFMSMENPGLWILGCHNSDFRNRGMTALLKVSSCDKNTGDYYEDSYEDISAYLLSKNNAIEPRSFSQNSRHPSTRQKQFNATTIPENDIEKTDPWFAHRTPMPKCQNVSSSDLLMLLRQSPTPHGLSLSDLQEAKYETFSDDPSPGAIDSNNSLSEMTHFRPQLHHSGDMVFTPESGLQLRLNEKLGTTAATELKKLDFKVSSTSNNLISTIPSDNLAAGTDNTSTLQSDQEEIDYDDTISVEMKKEDFDIYDEDENQSPRSFQKKTRHYFIAAVERLWDYGMSSSPHVLRNRAQSGSVPQFKKVVFQEFTDGSFTQPLYRGELNEHLGLLGPYIRAEVEDNIMVTFRNQASRPYSFYSSLISYEEDQRQGAEPRKNFVKPNETKTYFWKVQHHMAPTKDEFDCKAWAYFSDVDLEKDVHSGLIGPLLVCHTNTLNPAHGRQVTVQEFALFFTIFDETKSWYFTENMERNCRAPCNIQMEDPTFKENYRFHAINGYIMDTLPGLVMAQDQRIRWYLLSMGSNENIHSIHFSGHVFTVRKKEEYKMALYNLYPGVFETVEMLPSKAGIWRVECLIGEHLHAGMSTLFLVYSNKCQTPLGMASGHIRDFQITASGQYGQWAPKLARLHYSGSINAWSTKEPFSWIKVDLLAPMIIHGIKTQGARQKFSSLYISQFIIMYSLDGKKWQTYRGNSTGTLMVFFGNVDSSGIKHNIFNPPIIARYIRLHPTHYSIRSTLRMELMGCDLNSCSMPLGMESKAISDAQITASSYFTNMFATWSPSKARLHLQGRSNAWRPQVNNPKEWLQVDFQKTMKVTGVTTQGVKSLLTSMYVKEFLISSSQDGHQWTLFFQNGKVKVFQGNQDSFTPVVNSLDPPLLTRYLRIHPQSWVHQIALRMEVLGCEAQDLYLVPRGSGGGGSGGGGSGGGGSGGGGSGGGGSGGGGSGGGGSGGGGSGGGGSGGGGSGGGGSGGGGSGGGGSGGGGSGGGGSGGGGSGGGGSGGGGSGGGGSGGGGSGGGGSGGGGSGGGGSLSCRPPMVKLVCPADNLRAEGLECTKTCQNYDLECMSMGCVSGCLCPPGMVRHENRCVALERCPCFHQGKEYAPGETVKIGCNTCVCRDRKWNCTDHVCDATCSTIGMAHYLTFDGLKYLFPGECQYVLVQDYCGSNPGTFRILVGNKGCSHPSVKCKKRVTILVEGGEIELFDGEVNVKRPMKDETHFEVVESGRYIILLLGKALSVVWDRHLSISVVLKQTYQEKVCGLCGNFDGIQNNDLTSSNLQVEEDPVDFGNSWKVSSQCADTRKVPLDSSPATCHNNIMKQTMVDSSCRILTSDVFQDCNKLVDPEPYLDVCIYDTCSCESIGDCACFCDTIAAYAHVCAQHGKVVTWRTATLCPQSCEERNLRENGYECEWRYNSCAPACQVTCQHPEPLACPVQCVEGCHAHCPPGKILDELLQTCVDPEDCPVCEVAGRRFASGKKVTLNPSDPEHCQICHCDVVNLTCEACQEPGGLVVPPTDAPVSPTTLYVEDISEPPLHDFGGGGSGGGGSGGGGSGGGGSGGGGSGGGGSDKTHTCPPCPAPELLGGPSVFLFPPKPKDTLMISRTPEVTCVVVDVSHEDPEVKFNWYVDGVEVHNAKTKPREEQYNSTYRVVSVLTVLHQDWLNGKEYKCKVSNKALPAPIEKTISKAKGQPREPQVYTLPPSRDELTKNQVSLTCLVKGFYPSDIAVEWESNGQPENNYKTTPPVLDSDGSFFLYSKLTVDKSRWQQGNVFSCSVMHEALHNHYTQKSLSLSPGK

SEQ ID NO: 22 - protein, 227 aa, Artificial Sequence
  Fc of the complex of scFVIII/D'D3/Fc-120 and Fc
DKTHTCPPCPAPELLGGPSVFLFPPKPKDTLMISRTPEVTCVVVDVSHEDPEVKFNWYVDGVEVHNAKTKPREEQYNSTYRVVSVLTVLHQDWLNGKEYKCKVSNKALPAPIEKTISKAKGQPREPQVYTLPPSRDELTKNQVSLTCLVKGFYPSDIAVEWESNGQPENNYKTTPPVLDSDGSFFLYSKLTVDKSRWQQGNVFSCSVMHEALHNHYTQKSLSLSPGK

SEQ ID NO: 23 - protein, 1980 aa, Artificial Sequence
  dcFVIII/D'D3/D'D3-HC Heavy chain
ATRRYYLGAVELSWDYMQSDLGELPVDARFPPRVPKSFPFNTSVVYKKTLFVEFTDHLFNIAKPRPPWMGLLGPTIQAEVYDTVVITLKNMASHPVSLHAVGVSYWKASEGAEYDDQTSQREKEDDKVFPGGSHTYVWQVLKENGPMASDPLCLTYSYLSHVDLVKDLNSGLIGALLVCREGSLAKEKTQTLHKFILLFAVFDEGKSWHSETKNSLMQDRDAASARAWPKMHTVNGYVNRSLPGLIGCHRKSVYWHVIGMGTTPEVHSIFLEGHTFLVRNHRQASLEISPITFLTAQTLLMDLGQFLLFCHISSHQHDGMEAYVKVDSCPEEPQLRMKNNEEAEDYDDDLTDSEMDVVRFDDDNSPSFIQIRSVAKKHPKTWVHYIAAEEEDWDYAPLVLAPDDRSYKSQYLNNGPQRIGRKYKKVRFMAYTDETFKTREAIQHESGILGPLLYGEVGDTLLIIFKNQASRPYNIYPHGITDVRPLYSRRLPKGVKHLKDFPILPGEIFKYKWTVTVEDGPTKSDPRCLTRYYSSFVNMERDLASGLIGPLLICYKESVDQRGNQIMSDKRNVILFSVFDENRSWYLTENIQRFLPNPAGVQLEDPEFQASNIMHSINGYVFDSLQLSVCLHEVAYWYILSIGAQTDFLSVFFSGYTFKHKMVYEDTLTLFPFSGETVFMSMENPGLWILGCHNSDFRNRGMTALLKVSSCDKNTGDYYEDSYEDISAYLLSKNNAIEPRSFSQNSRHPSTRQKQFNATTIPENDIEKTDPWFAHRTPMPKCQNVSSSDLLMLLRQSPTPHGLSLSDLQEAKYETFSDDPSPGAIDSNNSLSEMTHFRPQLHHSGDMVFTPESGLQLRLNEKLGTTAATELKKLDFKVSSTSNNLISTIPSDNLAAGTDNTSSLGPPSMPVHYDSQLDTTLFGKKSSPLTESGGPLSLSCRPPMVKLVCPADNLRAEGLECTKTCQNYDLECMSMGCVSGCLCPPGMVRHENRCVALERCPCFHQGKEYAPGETVKIGCNTCVCRDRKWNCTDHVCDATCSTIGMAHYLTFDGLKYLFPGECQYVLVQDYCGSNPGTFRILVGNKGCSHPSVKCKKRVTILVEGGEIELFDGEVNVKRPMKDETHFEVVESGRYIILLLGKALSVVWDRHLSISVVLKQTYQEKVCGLCGNFDGIQNNDLTSSNLQVEEDPVDFGNSWKVSSQCADTRKVPLDSSPATCHNNIMKQTMVDSSCRILTSDVFQDCNKLVDPEPYLDVCIYDTCSCESIGDCACFCDTIAAYAHVCAQHGKVVTWRTATLCPQSCEERNLRENGYECEWRYNSCAPACQVTCQHPEPLACPVQCVEGCHAHCPPGKILDELLQTCVDPEDCPVCEVAGRRFASGKKVTLNPSDPEHCQICHCDVVNLTCEACQEPGGLVVPPTDAPVSPTTLYVEDISEPPLHDFGGGGSGGGGSGGGGSGGGGSGGGGSGGGGGSLSCRPPMVKLVCPADNLRAEGLECTKTCQNYDLECMSMGCVSGCLCPPGMVRHENRCVALERCPCFHQGKEYAPGETVKIGCNTCVCRDRKWNCTDHVCDATCSTIGMAHYLTFDGLKYLFPGECQYVLVQDYCGSNPGTFRILVGNKGCSHPSVKCKKRVTILVEGGEIELFDGEVNVKRPMKDETHFEVVESGRYIILLLGKALSVVWDRHLSISVVLKQTYQEKVCGLCGNFDGIQNNDLTSSNLQVEEDPVDFGNSWKVSSQCADTRKVPLDSSPATCHNNIMKQTMVDSSCRILTSDVFQDCNKLVDPEPYLDVCIYDTCSCESIGDCACFCDTIAAYAHVCAQHGKVVTWRTATLCPQSCEERNLRENGYECEWRYNSCAPACQVTCQHPEPLACPVQCVEGCHAHCPPGKILDELLQTCVDPEDCPVCEVAGRRFASGKKVTLNPSDPEHCQICHCDVVNLTCEACQEPGGLVVPPTDAPVSPTTLYVEDISEPPLHDF

SEQ ID NO: 24 - protein, 772 aa, Artificial Sequence; identical to SEQ ID NO: 5
  dcFVIII/D'D3/D'D3-HC Light chain

SEQ ID NO: 25 - protein, 2722 aa, Artificial Sequence
  scFVIII/D'D3/Fc/Fc-120
ATRRYYLGAVELSWDYMQSDLGELPVDARFPPRVPKSFPFNTSVVYKKTLFVEFTDHLFNIAKPRPPWMGLLGPTIQAEVYDTVVITLKNMASHPVSLHAVGVSYWKASEGAEYDDQTSQREKEDDKVFPGGSHTYVWQVLKENGPMASDPLCLTYSYLSHVDLVKDLNSGLIGALLVCREGSLAKEKTQTLHKFILLFAVFDEGKSWHSETKNSLMQDRDAASARAWPKMHTVNGYVNRSLPGLIGCHRKSVYWHVIGMGTTPEVHSIFLEGHTFLVRNHRQASLEISPITFLTAQTLLMDLGQFLLFCHISSHQHDGMEAYVKVDSCPEEPQLRMKNNEEAEDYDDDLTDSEMDVVRFDDDNSPSFIQIRSVAKKHPKTWVHYIAAEEEDWDYAPLVLAPDDRSYKSQYLNNGPQRIGRKYKKVRFMAYTDETFKTREAIQHESGILGPLLYGEVGDTLLIIFKNQASRPYNIYPHGITDVRPLYSRRLPKGVKHLKDFPILPGEIFKYKWTVTVEDGPTKSDPRCLTRYYSSFVNMERDLASGLIGPLLICYKESVDQRGNQIMSDKRNVILFSVFDENRSWYLTENIQRFLPNPAGVQLEDPEFQASNIMHSINGYVFDSLQLSVCLHEVAYWYILSIGAQTDFLSVFFSGYTFKHKMVYEDTLTLFPFSGETVFMSMENPGLWILGCHNSDFRNRGMTALLKVSSCDKNTGDYYEDSYEDISAYLLSKNNAIEPRSFSQNSRHPSTRQKQFNATTIPENDIEKTDPWFAHRTPMPKCQNVSSSDLLMLLRQSPTPHGLSLSDLQEAKYETFSDDPSPGAIDSNNSLSEMTHFRPQLHHSGDMVFTPESGLQLRLNEKLGTTAATELKKLDFKVSSTSNNLISTIPSDNLAAGTDNTSTLQSDQEEIDYDDTISVEMKKEDFDIYDEDENQSPRSFQKKTRHYFIAAVERLWDYGMSSSPHVLRNRAQSGSVPQFKKVVFQEFTDGSFTQPLYRGELNEHLGLLGPYIRAEVEDNIMVTFRNQASRPYSFYSSLISYEEDQRQGAEPRKNFVKPNETKTYFWKVQHHMAPTKDEFDCKAWAYFSDVDLEKDVHSGLIGPLLVCHTNTLNPAHGRQVTVQEFALFFTIFDETKSWYFTENMERNCRAPCNIQMEDPTFKENYRFHAINGYIMDTLPGLVMAQDQRIRWYLLSMGSNENIHSIHFSGHVFTVRKKEEYKMALYNLYPGVFETVEMLPSKAGIWRVECLIGEHLHAGMSTLFLVYSNKCQTPLGMASGHIRDFQITASGQYGQWAPKLARLHYSGSINAWSTKEPFSWIKVDLLAPMIIHGIKTQGARQKFSSLYISQFIIMYSLDGKKWQTYRGNSTGTLMVFFGNVDSSGIKHNIFNPPIIARYIRLHPTHYSIRSTLRMELMGCDLNSCSMPLGMESKAISDAQITASSYFTNMFATWSPSKARLHLQGRSNAWRPQVNNPKEWLQVDFQKTMKVTGVTTQGVKSLLTSMYVKEFLISSSQDGHQWTLFFQNGKVKVFQGNQDSFTPVVNSLDPPLLTRYLRIHPQSWVHQIALRMEVLGCEAQDLYLVPRGSGGGGSGGGGSGGGGSGGGGSGGGGSGGGGSGGGGSGGGGSGGGGSGGGGSGGGGSGGGGSGGGGSGGGGSGGGGSGGGGSGGGGSGGGGSGGGGSGGGGSGGGGSGGGGSGGGGSLSCRPPMVKLVCPADNLRAEGLECTKTCQNYDLECMSMGCVSGCLCPPGMVRHENRCVALERCPCFHQGKEYAPGETVKIGCNTCVCRDRKWNCTDHVCDATCSTIGMAHYLTFDGLKYLFPGECQYVLVQDYCGSNPGTFRILVGNKGCSHPSVKCKKRVTILVEGGEIELFDGEVNVKRPMKDETHFEVVESGRYIILLLGKALSVVWDRHLSISVVLKQTYQEKVCGLCGNFDGIQNNDLTSSNLQVEEDPVDFGNSWKVSSQCADTRKVPLDSSPATCHNNIMKQTMVDSSCRILTSDVFQDCNKLVDPEPYLDVCIYDTCSCESIGDCACFCDTIAAYAHVCAQHGKVVTWRTATLCPQSCEERNLRENGYECEWRYNSCAPACQVTCQHPEPLACPVQCVEGCHAHCPPGKILDELLQTCVDPEDCPVCEVAGRRFASGKKVTLNPSDPEHCQICHCDVVNLTCEACQEPGGLVVPPTDAPVSPTTLYVEDISEPPLHDFGGGGSGGGGSGGGGSGGGGSGGGGSGGGGSDKTHTCPPCPAPELLGGPSVFLFPPKPKDTLMISRTPEVTCVVVDVSHEDPEVKFNWYVDGVEVHNAKTKPREEQYNSTYRVVSVLTVLHQDWLNGKEYKCKVSNKALPAPIEKTISKAKGQPREPQVYTLPPSRDELTKNQVSLTCLVKGFYPSDIAVEWESNGQPENNYKTTPPVLDSDGSFFLYSKLTVDKSRWQQGNVFSCSVMHEALHNHYTQKSLSLSPGKGGGGSGGGGSGGGGSGGGGSGGGGSGGGGSDKTHTCPPCPAPELLGGPSVFLFPPKPKDTLMISRTPEVTCVVVDVSHEDPEVKFNWYVDGVEVHNAKTKPREEQYNSTYRVVSVLTVLHQDWLNGKEYKCKVSNKALPAPIEKTISKAKGQPREPQVYTLPPSRDELTKNQVSLTCLVKGFYPSDIAVEWESNGQPENNYKTTPPVLDSDGSFFLYSKLTVDKSRWQQGNVFSCSVMHEALHNHYTQKSLSLSPGK

SEQ ID NO: 26 - protein, 1700 aa, Artificial Sequence
  dcFVIII/D'D3/Fc-HC/Fc-LC Heavy chain
ATRRYYLGAVELSWDYMQSDLGELPVDARFPPRVPKSFPFNTSVVYKKTLFVEFTDHLFNIAKPRPPWMGLLGPTIQAEVYDTVVITLKNMASHPVSLHAVGVSYWKASEGAEYDDQTSQREKEDDKVFPGGSHTYVWQVLKENGPMASDPLCLTYSYLSHVDLVKDLNSGLIGALLVCREGSLAKEKTQTLHKFILLFAVFDEGKSWHSETKNSLMQDRDAASARAWPKMHTVNGYVNRSLPGLIGCHRKSVYWHVIGMGTTPEVHSIFLEGHTFLVRNHRQASLEISPITFLTAQTLLMDLGQFLLFCHISSHQHDGMEAYVKVDSCPEEPQLRMKNNEEAEDYDDDLTDSEMDVVRFDDDNSPSFIQIRSVAKKHPKTWVHYIAAEEEDWDYAPLVLAPDDRSYKSQYLNNGPQRIGRKYKKVRFMAYTDETFKTREAIQHESGILGPLLYGEVGDTLLIIFKNQASRPYNIYPHGITDVRPLYSRRLPKGVKHLKDFPILPGEIFKYKWTVTVEDGPTKSDPRCLTRYYSSFVNMERDLASGLIGPLLICYKESVDQRGNQIMSDKRNVILFSVFDENRSWYLTENIQRFLPNPAGVQLEDPEFQASNIMHSINGYVFDSLQLSVCLHEVAYWYILSIGAQTDFLSVFFSGYTFKHKMVYEDTLTLFPFSGETVFMSMENPGLWILGCHNSDFRNRGMTALLKVSSCDKNTGDYYEDSYEDISAYLLSKNNAIEPRSFSQNSRHPSTRQKQFNATTIPENDIEKTDPWFAHRTPMPKCQNVSSSDLLMLLRQSPTPHGLSLSDLQEAKYETFSDDPSPGAIDSNNSLSEMTHFRPQLHHSGDMVFTPESGLQLRLNEKLGTTAATELKKLDFKVSSTSNNLISTIPSDNLAAGTDNTSSLGPPSMPVHYDSQLDTTLFGKKSSPLTESGGPLSLSCRPPMVKLVCPADNLRAEGLECTKTCQNYDLECMSMGCVSGCLCPPGMVRHENRCVALERCPCFHQGKEYAPGETVKIGCNTCVCRDRKWNCTDHVCDATCSTIGMAHYLTFDGLKYLFPGECQYVLVQDYCGSNPGTFRILVGNKGCSHPSVKCKKRVTILVEGGEIELFDGEVNVKRPMKDETHFEVVESGRYIILLLGKALSVVWDRHLSISVVLKQTYQEKVCGLCGNFDGIQNNDLTSSNLQVEEDPVDFGNSWKVSSQCADTRKVPLDSSPATCHNNIMKQTMVDSSCRILTSDVFQDCNKLVDPEPYLDVCIYDTCSCESIGDCACFCDTIAAYAHVCAQHGKVVTWRTATLCPQSCEERNLRENGYECEWRYNSCAPACQVTCQHPEPLACPVQCVEGCHAHCPPGKILDELLQTCVDPEDCPVCEVAGRRFASGKKVTLNPSDPEHCQICHCDVVNLTCEACQEPGGLVVPPTDAPVSPTTLYVEDISEPPLHDFGGGGSGGGGSGGGGSGGGGSGGGGSGGGGSDKTHTCPPCPAPELLGGPSVFLFPPKPKDTLMISRTPEVTCVVVDVSHEDPEVKFNWYVDGVEVHNAKTKPREEQYNSTYRVVSVLTVLHQDWLNGKEYKCKVSNKALPAPIEKTISKAKGQPREPQVYTLPPSRDELTKNQVSLTCLVKGFYPSDIAVEWESNGQPENNYKTTPPVLDSDGSFFLYSKLTVDKSRWQQGNVFSCSVMHEALHNHYTQKSLSLSPGK

SEQ ID NO: 27 - protein, 1029 aa, Artificial Sequence
  dcFVIII/D'D3/Fc-HC/Fc-LC Light chain
ATDPLAWDNHYGTQIPKEEWKSQEKSPEKTAFKKKDTILSLNACESNHAIAAINEGQNKPEIEVTWAKQGRTERLCSQNPPVLKRHQREITRTTLQSDQEEIDYDDTISVEMKKEDFDIYDEDENQSPRSFQKKTRHYFIAAVERLWDYGMSSSPHVLRNRAQSGSVPQFKKVVFQEFTDGSFTQPLYRGELNEHLGLLGPYIRAEVEDNIMVTFRNQASRPYSFYSSLISYEEDQRQGAEPRKNFVKPNETKTYFWKVQHHMAPTKDEFDCKAWAYFSDVDLEKDVHSGLIGPLLVCHTNTLNPAHGRQVTVQEFALFFTIFDETKSWYFTENMERNCRAPCNIQMEDPTFKENYRFHAINGYIMDTLPGLVMAQDQRIRWYLLSMGSNENIHSIHFSGHVFTVRKKEEYKMALYNLYPGVFETVEMLPSKAGIWRVECLIGEHLHAGMSTLFLVYSNKCQTPLGMASGHIRDFQITASGQYGQWAPKLARLHYSGSINAWSTKEPFSWIKVDLLAPMIIHGIKTQGARQKFSSLYISQFIIMYSLDGKKWQTYRGNSTGTLMVFFGNVDSSGIKHNIFNPPIIARYIRLHPTHYSIRSTLRMELMGCDLNSCSMPLGMESKAISDAQITASSYFTNMFATWSPSKARLHLQGRSNAWRPQVNNPKEWLQVDFQKTMKVTGVTTQGVKSLLTSMYVKEFLISSSQDGHQWTLFFQNGKVKVFQGNQDSFTPVVNSLDPPLLTRYLRIHPQSWVHQIALRMEVLGCEAQDLYLVPRGSGGGGSGGGGSGGGGSGGGGSGGGSDKTHTCPPCPAPELLGGPSVFLFPPKPKDTLMISRTPEVTCVVVDVSHEDPEVKFNWYVDGVEVHNAKTKPREEQYNSTYRVVSVLTVLHQDWLNGKEYKCKVSNKALPAPIEKTISKAKGQPREPQVYTLPPSRDELTKNQVSLTCLVKGFYPSDIAVEWESNGQPENNYKTTPPVLDSDGSFFLYSKLTVDKSRWQQGNVFSCSVMHEALHNHYTQKSLSLSPGK

SEQ ID NO: 28 - protein, 1700 aa, Artificial Sequence; identical to SEQ ID NO: 26
  dcFVIII/D'D3/Fc-HC, Fc Heavy chain

SEQ ID NO: 29 - protein, 772 aa, Artificial Sequence; identical to SEQ ID NO: 5
  dcFVIII/D'D3/Fc-HC, Fc Light chain

SEQ ID NO: 30 - protein, 1957 aa, Artificial Sequence
  dcFVIII/D'D3/Fc/Fc-HC Heavy chain
ATRRYYLGAVELSWDYMQSDLGELPVDARFPPRVPKSFPFNTSVVYKKTLFVEFTDHLFNIAKPRPPWMGLLGPTIQAEVYDTVVITLKNMASHPVSLHAVGVSYWKASEGAEYDDQTSQREKEDDKVFPGGSHTYVWQVLKENGPMASDPLCLTYSYLSHVDLVKDLNSGLIGALLVCREGSLAKEKTQTLHKFILLFAVFDEGKSWHSETKNSLMQDRDAASARAWPKMHTVNGYVNRSLPGLIGCHRKSVYWHVIGMGTTPEVHSIFLEGHTFLVRNHRQASLEISPITFLTAQTLLMDLGQFLLFCHISSHQHDGMEAYVKVDSCPEEPQLRMKNNEEAEDYDDDLTDSEMDVVRFDDDNSPSFIQIRSVAKKHPKTWVHYIAAEEEDWDYAPLVLAPDDRSYKSQYLNNGPQRIGRKYKKVRFMAYTDETFKTREAIQHESGILGPLLYGEVGDTLLIIFKNQASRPYNIYPHGITDVRPLYSRRLPKGVKHLKDFPILPGEIFKYKWTVTVEDGPTKSDPRCLTRYYSSFVNMERDLASGLIGPLLICYKESVDQRGNQIMSDKRNVILFSVFDENRSWYLTENIQRFLPNPAGVQLEDPEFQASNIMHSINGYVFDSLQLSVCLHEVAYWYILSIGAQTDFLSVFFSGYTFKHKMVYEDTLTLFPFSGETVFMSMENPGLWILGCHNSDFRNRGMTALLKVSSCDKNTGDYYEDSYEDISAYLLSKNNAIEPRSFSQNSRHPSTRQKQFNATTIPENDIEKTDPWFAHRTPMPKCQNVSSSDLLMLLRQSPTPHGLSLSDLQEAKYETFSDDPSPGAIDSNNSLSEMTHFRPQLHHSGDMVFTPESGLQLRLNEKLGTTAATELKKLDFKVSSTSNNLISTIPSDNLAAGTDNTSSLGPPSMPVHYDSQLDTTLFGKKSSPLTESGGPLSLSCRPPMVKLVCPADNLRAEGLECTKTCQNYDLECMSMGCVSGCLCPPGMVRHENRCVALERCPCFHQGKEYAPGETVKIGCNTCVCRDRKWNCTDHVCDATCSTIGMAHYLTFDGLKYLFPGECQYVLVQDYCGSNPGTFRILVGNKGCSHPSVKCKKRVTILVEGGEIELFDGEVNVKRPMKDETHFEVVESGRYIILLLGKALSVVWDRHLSISVVLKQTYQEKVCGLCGNFDGIQNNDLTSSNLQVEEDPVDFGNSWKVSSQCADTRKVPLDSSPATCHNNIMKQTMVDSSCRILTSDVFQDCNKLVDPEPYLDVCIYDTCSCESIGDCACFCDTIAAYAHVCAQHGKVVTWRTATLCPQSCEERNLRENGYECEWRYNSCAPACQVTCQHPEPLACPVQCVEGCHAHCPPGKILDELLQTCVDPEDCPVCEVAGRRFASGKKVTLNPSDPEHCQICHCDVVNLTCEACQEPGGLVVPPTDAPVSPTTLYVEDISEPPLHDFGGGGSGGGGSGGGGSGGGGSGGGGSGGGGSDKTHTCPPCPAPELLGGPSVFLFPPKPKDTLMISRTPEVTCVVVDVSHEDPEVKFNWYVDGVEVHNAKTKPREEQYNSTYRVVSVLTVLHQDWLNGKEYKCKVSNKALPAPIEKTISKAKGQPREPQVYTLPPSRDELTKNQVSLTCLVKGFYPSDIAVEWESNGQPENNYKTTPPVLDSDGSFFLYSKLTVDKSRWQQGNVFSCSVMHEALHNHYTQKSLSLSPGKGGGGSGGGGSGGGGSGGGGSGGGGSGGGGSDKTHTCPPCPAPELLGGPSVFLFPPKPKDTLMISRTPEVTCVVVDVSHEDPEVKFNWYVDGVEVHNAKTKPREEQYNSTYRVVSVLTVLHQDWLNGKEYKCKVSNKALPAPIEKTISKAKGQPREPQVYTLPPSRDELTKNQVSLTCLVKGFYPSDIAVEWESNGQPENNYKTTPPVLDSDGSFFLYSKLTVDKSRWQQGNVFSCSVMHEALHNHYTQKSLSLSPGK

SEQ ID NO: 31 - protein, 772 aa, Artificial Sequence; identical to SEQ ID NO: 5
  dcFVIII/D'D3/Fc/Fc-HC Light chain

SEQ ID NO: 32 - protein, 1443 aa, Artificial Sequence; identical to SEQ ID NO: 4
  dcFVIII/D'D3-HC/Fc-LC, Fc Heavy chain

SEQ ID NO: 33 - protein, 1029 aa, Artificial Sequence; identical to SEQ ID NO: 27
  dcFVIII/D'D3-HC/Fc-LC, Fc Light chain

SEQ ID NO: 34 - protein, 1443 aa, Artificial Sequence; identical to SEQ ID NO: 4
  dcFVIII/D'D3-HC/Fc/Fc-LC Heavy chain

SEQ ID NO: 35 - protein, 1286 aa, Artificial Sequence
  dcFVIII/D'D3-HC/Fc/Fc-LC Light chain
ATDPLAWDNHYGTQIPKEEWKSQEKSPEKTAFKKKDTILSLNACESNHAIAAINEGQNKPEIEVTWAKQGRTERLCSQNPPVLKRHQREITRTTLQSDQEEIDYDDTISVEMKKEDFDIYDEDENQSPRSFQKKTRHYFIAAVERLWDYGMSSSPHVLRNRAQSGSVPQFKKVVFQEFTDGSFTQPLYRGELNEHLGLLGPYIRAEVEDNIMVTFRNQASRPYSFYSSLISYEEDQRQGAEPRKNFVKPNETKTYFWKVQHHMAPTKDEFDCKAWAYFSDVDLEKDVHSGLIGPLLVCHTNTLNPAHGRQVTVQEFALFFTIFDETKSWYFTENMERNCRAPCNIQMEDPTFKENYRFHAINGYIMDTLPGLVMAQDQRIRWYLLSMGSNENIHSIHFSGHVFTVRKKEEYKMALYNLYPGVFETVEMLPSKAGIWRVECLIGEHLHAGMSTLFLVYSNKCQTPLGMASGHIRDFQITASGQYGQWAPKLARLHYSGSINAWSTKEPFSWIKVDLLAPMIIHGIKTQGARQKFSSLYISQFIIMYSLDGKKWQTYRGNSTGTLMVFFGNVDSSGIKHNIFNPPIIARYIRLHPTHYSIRSTLRMELMGCDLNSCSMPLGMESKAISDAQITASSYFTNMFATWSPSKARLHLQGRSNAWRPQVNNPKEWLQVDFQKTMKVTGVTTQGVKSLLTSMYVKEFLISSSQDGHQWTLFFQNGKVKVFQGNQDSFTPVVNSLDPPLLTRYLRIHPQSWVHQIALRMEVLGCEAQDLYLVPRGSGGGGSGGGGSGGGGSGGGGSGGGSDKTHTCPPCPAPELLGGPSVFLFPPKPKDTLMISRTPEVTCVVVDVSHEDPEVKFNWYVDGVEVHNAKTKPREEQYNSTYRVVSVLTVLHQDWLNGKEYKCKVSNKALPAPIEKTISKAKGQPREPQVYTLPPSRDELTKNQVSLTCLVKGFYPSDIAVEWESNGQPENNYKTTPPVLDSDGSFFLYSKLTVDKSRWQQGNVFSCSVMHEALHNHYTQKSLSLSPGKGGGGSGGGGSGGGGSGGGGSGGGGSGGGGSDKTHTCPPCPAPELLGGPSVFLFPPKPKDTLMISRTPEVTCVVVDVSHEDPEVKFNWYVDGVEVHNAKTKPREEQYNSTYRVVSVLTVLHQDWLNGKEYKCKVSNKALPAPIEKTISKAKGQPREPQVYTLPPSRDELTKNQVSLTCLVKGFYPSDIAVEWESNGQPENNYKTTPPVLDSDGSFFLYSKLTVDKSRWQQGNVFSCSVMHEALHNHYTQKSLSLSPGK

SEQ ID NO: 36 - protein, 10 aa, Artificial Sequence
  Thrombin site
DFLAEGGGVR

SEQ ID NO: 37 - protein, 7 aa, Artificial Sequence
  Thrombin site
TTKIKPR

SEQ ID NO: 38 - protein, 6 aa, Artificial Sequence
  Thrombin site
LVPRGS

SEQ ID NO: 39 - protein, 11 aa, Artificial Sequence
  FVIIa site
ASKPQGRIVGG

SEQ ID NO: 40 - protein, 4 aa, Artificial Sequence
  FXa site
IDGR

SEQ ID NO: 41 - protein, 4 aa, Artificial Sequence
  FXa site
IEGR

SEQ ID NO: 42 - protein, 10 aa, Artificial Sequence
  FXa site
SKLTRAETVF

SEQ ID NO: 43 - DNA, 6999 bp, Homo sapiens
  gene (1)..(6999): mature FVIII
gccaccagaagatactacctgggtgcagtggaactgtcatgggactatatgcaaagtgatctcggtgagctgcctgtggacgcaagatttcctcctagagtgccaaaatcttttccattcaacacctcagtcgtgtacaaaaagactctgtttgtagaattcacggatcaccttttcaacatcgctaagccaaggccaccctggatgggtctgctaggtcctaccatccaggctgaggtttatgatacagtggtcattacacttaagaacatggcttcccatcctgtcagtcttcatgctgttggtgtatcctactggaaagcttctgagggagctgaatatgatgatcagaccagtcaaagggagaaagaagatgataaagtcttccctggtggaagccatacatatgtctggcaggtcctgaaagagaatggtccaatggcctctgacccactgtgccttacctactcatatctttctcatgtggacctggtaaaagacttgaattcaggcctcattggagccctactagtatgtagagaagggagtctggccaaggaaaagacacagaccttgcacaaatttatactactttttgctgtatttgatgaagggaaaagttggcactcagaaacaaagaactccttgatgcaggatagggatgctgcatctgctcgggcctggcctaaaatgcacacagtcaatggttatgtaaacaggtctctgccaggtctgattggatgccacaggaaatcagtctattggcatgtgattggaatgggcaccactcctgaagtgcactcaatattcctcgaaggtcacacatttcttgtgaggaaccatcgccaggcgtccttggaaatctcgccaataactttccttactgctcaaacactcttgatggaccttggacagtttctactgttttgtcatatctcttcccaccaacatgatggcatggaagcttatgtcaaagtagacagctgtccagaggaaccccaactacgaatgaaaaataatgaagaagcggaagactatgatgatgatcttactgattctgaaatggatgtggtcaggtttgatgatgacaactctccttcctttatccaaattcgctcagttgccaagaagcatcctaaaacttgggtacattacattgctgctgaagaggaggactgggactatgctcccttagtcctcgcccccgatgacagaagttataaaagtcaatatttgaacaatggccctcagcggattggtaggaagtacaaaaaagtccgatttatggcatacacagatgaaacctttaagactcgtgaagctattcagcatgaatcaggaatcttgggacctttactttatggggaagttggagacacactgttgattatatttaagaatcaagcaagcagaccatataacatctaccctcacggaatcactgatgtccgtcctttgtattcaaggagattaccaaaaggtgtaaaacatttgaaggattttccaattctgccaggagaaatattcaaatataaatggacagtgactgtagaagatgggccaactaaatcagatcctcggtgcctgacccgctattactctagtttcgttaatatggagagagatctagcttcaggactcattggccctctcctcatctgctacaaagaatctgtagatcaaagaggaaaccagataatgtcagacaagaggaatgtcatcctgttttctgtatttgatgagaaccgaagctggtacctcacagagaatatacaacgctttctccccaatccagctggagtgcagcttgaggatccagagttccaagcctccaacatcatgcacagcatcaatggctatgtttttgatagtttgcagttgtcagtttgtttgcatgaggtggcatactggtacattctaagcattggagcacagactgacttcctttctgtcttcttctctggatataccttcaaacacaaaatggtctatgaagacacactcaccctattcccattctcaggagaaactgtcttcatgtcgatggaaaacccaggtctatggattctggggtgccacaactcagactttcggaacagaggcatgaccgccttactgaaggtttctagttgtgacaagaacactggtgattattacgaggacagttatgaagatatttcagcatacttgctgagtaaaaacaatgccattgaaccaagaagcttctcccagaattcaagacaccctagcactaggcaaaagcaatttaatgccaccacaattccagaaaatgacatagagaagactgacccttggtttgcacacagaacacctatgcctaaaatacaaaatgtctcctctagtgatttgttgatgctcttgcgacagagtcctactccacatgggctatccttatctgatctccaagaagccaaatatgagactttttctgatgatccatcacctggagcaatagacagtaataacagcctgtctgaaatgacacacttcaggccacagctccatcacagtggggacatggtatttacccctgagtcaggcctccaattaagattaaatgagaaactggggacaactgcagcaacagagttgaagaaacttgatttcaaagtttctagtacatcaaataatctgatttcaacaattccatcagacaatttggcagcaggtactgataatacaagttccttaggacccccaagtatgccagttcattatgatagtcaattagataccactctatttggcaaaaagtcatctccccttactgagtctggtggacctctgagcttgagtgaagaaaataatgattcaaagttgttagaatcaggtttaatgaatagccaagaaagttcatggggaaaaaatgtatcgtcaacagagagtggtaggttatttaaagggaaaagagctcatggacctgctttgttgactaaagataatgccttattcaaagttagcatctctttgttaaagacaaacaaaacttccaataattcagcaactaatagaaagactcacattgatggcccatcattattaattgagaatagtccatcagtctggcaaaatatattagaaagtgacactgagtttaaaaaagtgacacctttgattcatgacagaatgcttatggacaaaaatgctacagctttgaggctaaatcatatgtcaaataaaactacttcatcaaaaaacatggaaatggtccaacagaaaaaagagggccccattccaccagatgcacaaaatccagatatgtcgttctttaagatgctattcttgccagaatcagcaaggtggatacaaaggactcatggaaagaactctctgaactctgggcaaggccccagtccaaagcaattagtatccttaggaccagaaaaatctgtggaaggtcagaatttcttgtctgagaaaaacaaagtggtagtaggaaagggtgaatttacaaaggacgtaggactcaaagagatggtttttccaagcagcagaaacctatttcttactaacttggataatttacatgaaaataatacacacaatcaagaaaaaaaaattcaggaagaaatagaaaagaaggaaacattaatccaagagaatgtagttttgcctcagatacatacagtgactggcactaagaatttcatgaagaaccttttcttactgagcactaggcaaaatgtagaaggttcatatgacggggcatatgctccagtacttcaagattttaggtcattaaatgattcaacaaatagaacaaagaaacacacagctcatttctcaaaaaaaggggaggaagaaaacttggaaggcttgggaaatcaaaccaagcaaattgtagagaaatatgcatgcaccacaaggatatctcctaatacaagccagcagaattttgtcacgcaacgtagtaagagagctttgaaacaattcagactcccactagaagaaacagaacttgaaaaaaggataattgtggatgacacctcaacccagtggtccaaaaacatgaaacatttgaccccgagcaccctcacacagatagactacaatgagaaggagaaaggggccattactcagtctcccttatcagattgccttacgaggagtcatagcatccctcaagcaaatagatctccattacccattgcaaaggtatcatcatttccatctattagacctatatatctgaccagggtcctattccaagacaactcttctcatcttccagcagcatcttatagaaagaaagattctggggtccaagaaagcagtcatttcttacaaggagccaaaaaaaataacctttctttagccattctaaccttggagatgactggtgatcaaagagaggttggctccctggggacaagtgccacaaattcagtcacatacaagaaagttgagaacactgttctcccgaaaccagacttgcccaaaacatctggcaaagttgaattgcttccaaaagttcacatttatcagaaggacctattccctacggaaactagcaatgggtctcctggccatctggatctcgtggaagggagccttcttcagggaacagagggagcgattaagtggaatgaagcaaacagacctggaaaagttccctttctgagagtagcaacagaaagctctgcaaagactccctccaagctattggatcctcttgcttgggataaccactatggtactcagataccaaaagaagagtggaaatcccaagagaagtcaccagaaaaaacagcttttaagaaaaaggataccattttgtccctgaacgcttgtgaaagcaatcatgcaatagcagcaataaatgagggacaaaataagcccgaaatagaagtcacctgggcaaagcaaggtaggactgaaaggctgtgctctcaaaacccaccagtcttgaaacgccatcaacgggaaataactcgtactactcttcagtcagatcaagaggaaattgactatgatgataccatatcagttgaaatgaagaaggaagattttgacatttatgatgaggatgaaaatcagagcccccgcagctttcaaaagaaaacacgacactattttattgctgcagtggagaggctctgggattatgggatgagtagctccccacatgttctaagaaacagggctcagagtggcagtgtccctcagttcaagaaagttgttttccaggaatttactgatggctcctttactcagcccttataccgtggagaactaaatgaacatttgggactcctggggccatatataagagcagaagttgaagataatatcatggtaactttcagaaatcaggcctctcgtccctattccttctattctagccttatttcttatgaggaagatcagaggcaaggagcagaacctagaaaaaactttgtcaagcctaatgaaaccaaaacttacttttggaaagtgcaacatcatatggcacccactaaagatgagtttgactgcaaagcctgggcttatttctctgatgttgacctggaaaaagatgtgcactcaggcctgattggaccccttctggtctgccacactaacacactgaaccctgctcatgggagacaagtgacagtacaggaatttgctctgtttttcaccatctttgatgagaccaaaagctggtacttcactgaaaatatggaaagaaactgcagggctccctgcaatatccagatggaagatcccacttttaaagagaattatcgcttccatgcaatcaatggctacataatggatacactacctggcttagtaatggctcaggatcaaaggattcgatggtatctgctcagcatgggcagcaatgaaaacatccattctattcatttcagtggacatgtgttcactgtacgaaaaaaagaggagtataaaatggcactgtacaatctctatccaggtgtttttgagacagtggaaatgttaccatccaaagctggaatttggcgggtggaatgccttattggcgagcatctacatgctgggatgagcacactttttctggtgtacagcaataagtgtcagactcccctgggaatggcttctggacacattagagattttcagattacagcttcaggacaatatggacagtgggccccaaagctggccagacttcattattccggatcaatcaatgcctggagcaccaaggagcccttttcttggatcaaggtggatctgttggcaccaatgattattcacggcatcaagacccagggtgcccgtcagaagttctccagcctctacatctctcagtttatcatcatgtatagtcttgatgggaagaagtggcagacttatcgaggaaattccactggaaccttaatggtcttctttggcaatgtggattcatctgggataaaacacaatatttttaaccctccaattattgctcgatacatccgtttgcacccaactcattatagcattcgcagcactcttcgcatggagttgatgggctgtgatttaaatagttgcagcatgccattgggaatggagagtaaagcaatatcagatgcacagattactgcttcatcctactttaccaatatgtttgccacctggtctccttcaaaagctcgacttcacctccaagggaggagtaatgcctggagacctcaggtgaataatccaaaagagtggctgcaagtggacttccagaagacaatgaaagtcacaggagtaactactcagggagtaaaatctctgcttaccagcatgtatgtgaaggagttcctcatctccagcagtcaagatggccatcagtggactctcttttttcagaatggcaaagtaaaggtttttcagggaaatcaagactccttcacacctgtggtgaactctctagacccaccgttactgactcgctaccttcgaattcacccccagagttgggtgcaccagattgccctgaggatggaggttctgggctgcgaggcacaggacctctactga

SEQ ID NO: 44 - DNA, 8376 bp, Homo sapiens
  gene (1)..(8376): full length vWF
gcagaaggaactcgcggcaggtcatccacggcccgatgcagccttttcggaagtgacttcgtcaacacctttgatgggagcatgtacagctttgcgggatactgcagttacctcctggcagggggctgccagaaacgctccttctcgattattggggacttccagaatggcaagagagtgagcctctccgtgtatcttggggaattttttgacatccatttgtttgtcaatggtaccgtgacacagggggaccaaagagtctccatgccctatgcctccaaagggctgtatctagaaactgaggctgggtactacaagctgtccggtgaggcctatggctttgtggccaggatcgatggcagcggcaactttcaagtcctgctgtcagacagatacttcaacaagacctgcgggctgtgtggcaactttaacatctttgctgaagatgactttatgacccaagaagggaccttgacctcggacccttatgactttgccaactcatgggctctgagcagtggagaacagtggtgtgaacgggcatctcctcccagcagctcatgcaacatctcctctggggaaatgcagaagggcctgtgggagcagtgccagcttctgaagagcacctcggtgtttgcccgctgccaccctctggtggaccccgagccttttgtggccctgtgtgagaagactttgtgtgagtgtgctggggggctggagtgcgcctgccctgccctcctggagtacgcccggacctgtgcccaggagggaatggtgctgtacggctggaccgaccacagcgcgtgcagcccagtgtgccctgctggtatggagtataggcagtgtgtgtccccttgcgccaggacctgccagagcctgcacatcaatgaaatgtgtcaggagcgatgcgtggatggctgcagctgccctgagggacagctcctggatgaaggcctctgcgtggagagcaccgagtgtccctgcgtgcattccggaaagcgctaccctcccggcacctccctctctcgagactgcaacacctgcatttgccgaaacagccagtggatctgcagcaatgaagaatgtccaggggagtgccttgtcacaggtcaatcacacttcaagagctttgacaacagatacttcaccttcagtgggatctgccagtacctgctggcccgggattgccaggaccactccttctccattgtcattgagactgtccagtgtgctgatgaccgcgacgctgtgtgcacccgctccgtcaccgtccggctgcctggcctgcacaacagccttgtgaaactgaagcatggggcaggagttgccatggatggccaggacgtccagctccccctcctgaaaggtgacctccgcatccagcatacagtgacggcctccgtgcgcctcagctacggggaggacctgcagatggactgggatggccgcgggaggctgctggtgaagctgtcccccgtctatgccgggaagacctgcggcctgtgtgggaattacaatggcaaccagggcgacgacttccttaccccctctgggctggcggagccccgggtggaggacttcgggaacgcctggaagctgcacggggactgccaggacctgcagaagcagcacagcgatccctgcgccctcaacccgcgcatgaccaggttctccgaggaggcgtgcgcggtcctgacgtcccccacattcgaggcctgccatcgtgccgtcagcccgctgccctacctgcggaactgccgctacgacgtgtgctcctgctcggacggccgcgagtgcctgtgcggcgccctggccagctatgccgcggcctgcgcggggagaggcgtgcgcgtcgcgtggcgcgagccaggccgctgtgagctgaactgcccgaaaggccaggtgtacctgcagtgcgggaccccctgcaacctgacctgccgctctctctcttacccggatgaggaatgcaatgaggcctgcctggagggctgcttctgccccccagggctctacatggatgagaggggggactgcgtgcccaaggcccagtgcccctgttactatgacggtgagatcttccagccagaagacatcttctcagaccatcacaccatgtgctactgtgaggatggcttcatgcactgtaccatgagtggagtccccggaagcttgctgcctgacgctgtcctcagcagtcccctgtctcatcgcagcaaaaggagcctatcctgtcggccccccatggtcaagctggtgtgtcccgctgacaacctgcgggctgaagggctcgagtgtaccaaaacgtgccagaactatgacctggagtgcatgagcatgggctgtgtctctggctgcctctgccccccgggcatggtccggcatgagaacagatgtgtggccctggaaaggtgtccctgcttccatcagggcaaggagtatgcccctggagaaacagtgaagattggctgcaacacttgtgtctgtcgggaccggaagtggaactgcacagaccatgtgtgtgatgccacgtgctccacgatcggcatggcccactacctcaccttcgacgggctcaaatacctgttccccggggagtgccagtacgttctggtgcaggattactgcggcagtaaccctgggacctttcggatcctagtggggaataagggatgcagccacccctcagtgaaatgcaagaaacgggtcaccatcctggtggagggaggagagattgagctgtttgacggggaggtgaatgtgaagaggcccatgaaggatgagactcactttgaggtggtggagtctggccggtacatcattctgctgctgggcaaagccctctccgtggtctgggaccgccacctgagcatctccgtggtcctgaagcagacataccaggagaaagtgtgtggcctgtgtgggaattttgatggcatccagaacaatgacctcaccagcagcaacctccaagtggaggaagaccctgtggactttgggaactcctggaaagtgagctcgcagtgtgctgacaccagaaaagtgcctctggactcatcccctgccacctgccataacaacatcatgaagcagacgatggtggattcctcctgtagaatccttaccagtgacgtcttccaggactgcaacaagctggtggaccccgagccatatctggatgtctgcatttacgacacctgctcctgtgagtccattggggactgcgcctgcttctgcgacaccattgctgcctatgcccacgtgtgtgcccagcatggcaaggtggtgacctggaggacggccacattgtgcccccagagctgcgaggagaggaatctccgggagaacgggtatgagtgtgagtggcgctataacagctgtgcacctgcctgtcaagtcacgtgtcagcaccctgagccactggcctgccctgtgcagtgtgtggagggctgccatgcccactgccctccagggaaaatcctggatgagcttttgcagacctgcgttgaccctgaagactgtccagtgtgtgaggtggctggccggcgttttgcctcaggaaagaaagtcaccttgaatcccagtgaccctgagcactgccagatttgccactgtgatgttgtcaacctcacctgtgaagcctgccaggagccgggaggcctggtggtgcctcccacagatgccccggtgagccccaccactctgtatgtggaggacatctcggaaccgccgttgcacgatttctactgcagcaggctactggacctggtcttcctgctggatggctcctccaggctgtccgaggctgagtttgaagtgctgaaggcctttgtggtggacatgatggagcggctgcgcatctcccagaagtgggtccgcgtggccgtggtggagtaccacgacggctcccacgcctacatcgggctcaaggaccggaagcgaccgtcagagctgcggcgcattgccagccaggtgaagtatgcgggcagccaggtggcctccaccagcgaggtcttgaaatacacactgttccaaatcttcagcaagatcgaccgccctgaagcctcccgcatcaccctgctcctgatggccagccaggagccccaacggatgtcccggaactttgtccgctacgtccagggcctgaagaagaagaaggtcattgtgatcccggtgggcattgggccccatgccaacctcaagcagatccgcctcatcgagaagcaggcccctgagaacaaggccttcgtgctgagcagtgtggatgagctggagcagcaaagggacgagatcgttagctacctctgtgaccttgcccctgaagcccctcctcctactctgccccccgacatggcacaagtcactgtgggcccggggctcttgggggtttcgaccctggggcccaagaggaactccatggttctggatgtggcgttcgtcctggaaggatcggacaaaattggtgaagccgacttcaacaggagcaaggagttcatggaggaggtgattcagcggatggatgtgggccaggacagcatccacgtcacggtgctgcagtactcctacatggtgactgtggagtaccccttcagcgaggcacagtccaaaggggacatcctgcagcgggtgcgagagatccgctaccagggcggcaacaggaccaacactgggctggccctgcggtacctctctgaccacagcttcttggtcagccagggtgaccgggagcaggcgcccaacctggtctacatggtcaccggaaatcctgcctctgatgagatcaagaggctgcctggagacatccaggtggtgcccattggagtgggccctaatgccaacgtgcaggagctggagaggattggctggcccaatgcccctatcctcatccaggactttgagacgctcccccgagaggctcctgacctggtgctgcagaggtgctgctccggagaggggctgcagatccccaccctctcccctgcacctgactgcagccagcccctggacgtgatccttctcctggatggctcctccagtttcccagcttcttattttgatgaaatgaagagtttcgccaaggctttcatttcaaaagccaatatagggcctcgtctcactcaggtgtcagtgctgcagtatggaagcatcaccaccattgacgtgccatggaacgtggtcccggagaaagcccatttgctgagccttgtggacgtcatgcagcgggagggaggccccagccaaatcggggatgccttgggctttgctgtgcgatacttgacttcagaaatgcatggtgccaggccgggagcctcaaaggcggtggtcatcctggtcacggacgtctctgtggattcagtggatgcagcagctgatgccgccaggtccaacagagtgacagtgttccctattggaattggagatcgctacgatgcagcccagctacggatcttggcaggcccagcaggcgactccaacgtggtgaagctccagcgaatcgaagacctccctaccatggtcaccttgggcaattccttcctccacaaactgtgctctggatttgttaggatttgcatggatgaggatgggaatgagaagaggcccggggacgtctggaccttgccagaccagtgccacaccgtgacttgccagccagatggccagaccttgctgaagagtcatcgggtcaactgtgaccgggggctgaggccttcgtgccctaacagccagtcccctgttaaagtggaagagacctgtggctgccgctggacctgcccctgcgtgtgcacaggcagctccactcggcacatcgtgacctttgatgggcagaatttcaagctgactggcagctgttcttatgtcctatttcaaaacaaggagcaggacctggaggtgattctccataatggtgcctgcagccctggagcaaggcagggctgcatgaaatccatcgaggtgaagcacagtgccctctccgtcgagctgcacagtgacatggaggtgacggtgaatgggagactggtctctgttccttacgtgggtgggaacatggaagtcaacgtttatggtgccatcatgcatgaggtcagattcaatcaccttggtcacatcttcacattcactccacaaaacaatgagttccaactgcagctcagccccaagacttttgcttcaaagacgtatggtctgtgtgggatctgtgatgagaacggagccaatgacttcatgctgagggatggcacagtcaccacagactggaaaacacttgttcaggaatggactgtgcagcggccagggcagacgtgccagcccatcctggaggagcagtgtcttgtccccgacagctcccactgccaggtcctcctcttaccactgtttgctgaatgccacaaggtcctggctccagccacattctatgccatctgccagcaggacagttgccaccaggagcaagtgtgtgaggtgatcgcctcttatgcccacctctgtcggaccaacggggtctgcgttgactggaggacacctgatttctgtgctatgtcatgcccaccatctctggtctacaaccactgtgagcatggctgtccccggcactgtgatggcaacgtgagctcctgtggggaccatccctccgaaggctgtttctgccctccagataaagtcatgttggaaggcagctgtgtccctgaagaggcctgcactcagtgcattggtgaggatggagtccagcaccagttcctggaagcctgggtcccggaccaccagccctgtcagatctgcacatgcctcagcgggcggaaggtcaactgcacaacgcagccctgccccacggccaaagctcccacgtgtggcctgtgtgaagtagcccgcctccgccagaatgcagaccagtgctgccccgagtatgagtgtgtgtgtgacccagtgagctgtgacctgcccccagtgcctcactgtgaacgtggcctccagcccacactgaccaaccctggcgagtgcagacccaacttcacctgcgcctgcaggaaggaggagtgcaaaagagtgtccccaccctcctgccccccgcaccgtttgcccacccttcggaagacccagtgctgtgatgagtatgagtgtgcctgcaactgtgtcaactccacagtgagctgtccccttgggtacttggcctcaactgccaccaatgactgtggctgtaccacaaccacctgccttcccgacaaggtgtgtgtccaccgaagcaccatctaccctgtgggccagttctgggaggagggctgcgatgtgtgcacctgcaccgacatggaggatgccgtgatgggcctccgcgtggcccagtgctcccagaagccctgtgaggacagctgtcggtcgggcttcacttacgttctgcatgaaggcgagtgctgtggaaggtgcctgccatctgcctgtgaggtggtgactggctcaccgcggggggactcccagtcttcctggaagagtgtcggctcccagtgggcctccccggagaacccctgcctcatcaatgagtgtgtccgagtgaaggaggaggtctttatacaacaaaggaacgtctcctgcccccagctggaggtccctgtctgcccctcgggctttcagctgagctgtaagacctcagcgtgctgcccaagctgtcgctgtgagcgcatggaggcctgcatgctcaatggcactgtcattgggcccgggaagactgtgatgatcgatgtgtgcacgacctgccgctgcatggtgcaggtgggggtcatctctggattcaagctggagtgcaggaagaccacctgcaacccctgccccctgggttacaaggaagaaaataacacaggtgaatgttgtgggagatgtttgcctacggcttgcaccattcagctaagaggaggacagatcatgacactgaagcgtgatgagacgctccaggatggctgtgatactcacttctgcaaggtcaatgagagaggagagtacttctgggagaagagggtcacaggctgcccaccctttgatgaacacaagtgtctggctgagggaggtaaaattatgaaaattccaggcacctgctgtgacacatgtgaggagcctgagtgcaacgacatcactgccaggctgcagtatgtcaaggtgggaagctgtaagtctgaagtagaggtggatatccactactgccagggcaaatgtgccagcaaagccatgtactccattgacatcaacgatgtgcaggaccagtgctcctgctgctctccgacacggacggagcccatgcaggtggccctgcactgcaccaatggctctgttgtgtaccatgaggttctcaatgccatggagtgcaaatgctcccccaggaagtgcagcaagtga

SEQ ID NO: 45 - DNA, 4749 bp, Artificial Sequence
  Single chain FVIII with partial B domain
  misc_feature (2344): W= A or T
  misc_feature (2345): K= T or G
  misc_feature (2346): W= A or T
  misc_feature (2344)..(2346): encoding Isoleucine or Cysteine
gccaccagaagatactacctgggtgcagtggaactgtcatgggactatatgcaaagtgatctcggtgagctgcctgtggacgcaagatttcctcctagagtgccaaaatcttttccattcaacacctcagtcgtgtacaaaaagactctgtttgtagaattcacggatcaccttttcaacatcgctaagccaaggccaccctggatgggtctgctaggtcctaccatccaggctgaggtttatgatacagtggtcattacacttaagaacatggcttcccatcctgtcagtcttcatgctgttggtgtatcctactggaaagcttctgagggagctgaatatgatgatcagaccagtcaaagggagaaagaagatgataaagtcttccctggtggaagccatacatatgtctggcaggtcctgaaagagaatggtccaatggcctctgacccactgtgccttacctactcatatctttctcatgtggacctggtaaaagacttgaattcaggcctcattggagccctactagtatgtagagaagggagtctggccaaggaaaagacacagaccttgcacaaatttatactactttttgctgtatttgatgaagggaaaagttggcactcagaaacaaagaactccttgatgcaggatagggatgctgcatctgctcgggcctggcctaaaatgcacacagtcaatggttatgtaaacaggtctctgccaggtctgattggatgccacaggaaatcagtctattggcatgtgattggaatgggcaccactcctgaagtgcactcaatattcctcgaaggtcacacatttcttgtgaggaaccatcgccaggcgtccttggaaatctcgccaataactttccttactgctcaaacactcttgatggaccttggacagtttctactgttttgtcatatctcttcccaccaacatgatggcatggaagcttatgtcaaagtagacagctgtccagaggaaccccaactacgaatgaaaaataatgaagaagcggaagactatgatgatgatcttactgattctgaaatggatgtggtcaggtttgatgatgacaactctccttcctttatccaaattcgctcagttgccaagaagcatcctaaaacttgggtacattacattgctgctgaagaggaggactgggactatgctcccttagtcctcgcccccgatgacagaagttataaaagtcaatatttgaacaatggccctcagcggattggtaggaagtacaaaaaagtccgatttatggcatacacagatgaaacctttaagactcgtgaagctattcagcatgaatcaggaatcttgggacctttactttatggggaagttggagacacactgttgattatatttaagaatcaagcaagcagaccatataacatctaccctcacggaatcactgatgtccgtcctttgtattcaaggagattaccaaaaggtgtaaaacatttgaaggattttccaattctgccaggagaaatattcaaatataaatggacagtgactgtagaagatgggccaactaaatcagatcctcggtgcctgacccgctattactctagtttcgttaatatggagagagatctagcttcaggactcattggccctctcctcatctgctacaaagaatctgtagatcaaagaggaaaccagataatgtcagacaagaggaatgtcatcctgttttctgtatttgatgagaaccgaagctggtacctcacagagaatatacaacgctttctccccaatccagctggagtgcagcttgaggatccagagttccaagcctccaacatcatgcacagcatcaatggctatgtttttgatagtttgcagttgtcagtttgtttgcatgaggtggcatactggtacattctaagcattggagcacagactgacttcctttctgtcttcttctctggatataccttcaaacacaaaatggtctatgaagacacactcaccctattcccattctcaggagaaactgtcttcatgtcgatggaaaacccaggtctatggattctggggtgccacaactcagactttcggaacagaggcatgaccgccttactgaaggtttctagttgtgacaagaacactggtgattattacgaggacagttatgaagatatttcagcatacttgctgagtaaaaacaatgccattgaaccaagaagcttctcccagaattcaagacaccctagcactaggcaaaagcaatttaatgccaccacaattccagaaaatgacatagagaagactgacccttggtttgcacacagaacacctatgcctaaawkwcaaaatgtctcctctagtgatttgttgatgctcttgcgacagagtcctactccacatgggctatccttatctgatctccaagaagccaaatatgagactttttctgatgatccatcacctggagcaatagacagtaataacagcctgtctgaaatgacacacttcaggccacagctccatcacagtggggacatggtatttacccctgagtcaggcctccaattaagattaaatgagaaactggggacaactgcagcaacagagttgaagaaacttgatttcaaagtttctagtacatcaaataatctgatttcaacaattccatcagacaatttggcagcaggtactgataatacaagtactcttcagtcagatcaagaggaaattgactatgatgataccatatcagttgaaatgaagaaggaagattttgacatttatgatgaggatgaaaatcagagcccccgcagctttcaaaagaaaacacgacactattttattgctgcagtggagaggctctgggattatgggatgagtagctccccacatgttctaagaaacagggctcagagtggcagtgtccctcagttcaagaaagttgttttccaggaatttactgatggctcctttactcagcccttataccgtggagaactaaatgaacatttgggactcctggggccatatataagagcagaagttgaagataatatcatggtaactttcagaaatcaggcctctcgtccctattccttctattctagccttatttcttatgaggaagatcagaggcaaggagcagaacctagaaaaaactttgtcaagcctaatgaaaccaaaacttacttttggaaagtgcaacatcatatggcacccactaaagatgagtttgactgcaaagcctgggcttatttctctgatgttgacctggaaaaagatgtgcactcaggcctgattggaccccttctggtctgccacactaacacactgaaccctgctcatgggagacaagtgacagtacaggaatttgctctgtttttcaccatctttgatgagaccaaaagctggtacttcactgaaaatatggaaagaaactgcagggctccctgcaatatccagatggaagatcccacttttaaagagaattatcgcttccatgcaatcaatggctacataatggatacactacctggcttagtaatggctcaggatcaaaggattcgatggtatctgctcagcatgggcagcaatgaaaacatccattctattcatttcagtggacatgtgttcactgtacgaaaaaaagaggagtataaaatggcactgtacaatctctatccaggtgtttttgagacagtggaaatgttaccatccaaagctggaatttggcgggtggaatgccttattggcgagcatctacatgctgggatgagcacactttttctggtgtacagcaataagtgtcagactcccctgggaatggcttctggacacattagagattttcagattacagcttcaggacaatatggacagtgggccccaaagctggccagacttcattattccggatcaatcaatgcctggagcaccaaggagcccttttcttggatcaaggtggatctgttggcaccaatgattattcacggcatcaagacccagggtgcccgtcagaagttctccagcctctacatctctcagtttatcatcatgtatagtcttgatgggaagaagtggcagacttatcgaggaaattccactggaaccttaatggtcttctttggcaatgtggattcatctgggataaaacacaatatttttaaccctccaattattgctcgatacatccgtttgcacccaactcattatagcattcgcagcactcttcgcatggagttgatgggctgtgatttaaatagttgcagcatgccattgggaatggagagtaaagcaatatcagatgcacagattactgcttcatcctactttaccaatatgtttgccacctggtctccttcaaaagctcgacttcacctccaagggaggagtaatgcctggagacctcaggtgaataatccaaaagagtggctgcaagtggacttccagaagacaatgaaagtcacaggagtaactactcagggagtaaaatctctgcttaccagcatgtatgtgaaggagttcctcatctccagcagtcaagatggccatcagtggactctcttttttcagaatggcaaagtaaaggtttttcagggaaatcaagactccttcacacctgtggtgaactctctagacccaccgttactgactcgctaccttcgaattcacccccagagttgggtgcaccagattgccctgaggatggaggttctgggctgcgaggcacaggacctctactgataa

SEQ ID NO: 46 - DNA, 4335 bp, Artificial Sequence
  dcFVIII/D'D3-HC Heavy chain
gccaccagaagatactacctgggtgcagtggaactgtcatgggactatatgcaaagtgatctcggtgagctgcctgtggacgcaagatttcctcctagagtgccaaaatcttttccattcaacacctcagtcgtgtacaaaaagactctgtttgtagaattcacggatcaccttttcaacatcgctaagccaaggccaccctggatgggtctgctaggtcctaccatccaggctgaggtttatgatacagtggtcattacacttaagaacatggcttcccatcctgtcagtcttcatgctgttggtgtatcctactggaaagcttctgagggagctgaatatgatgatcagaccagtcaaagggagaaagaagatgataaagtcttccctggtggaagccatacatatgtctggcaggtcctgaaagagaatggtccaatggcctctgacccactgtgccttacctactcatatctttctcatgtggacctggtaaaagacttgaattcaggcctcattggagccctactagtatgtagagaagggagtctggccaaggaaaagacacagaccttgcacaaatttatactactttttgctgtatttgatgaagggaaaagttggcactcagaaacaaagaactccttgatgcaggatagggatgctgcatctgctcgggcctggcctaaaatgcacacagtcaatggttatgtaaacaggtctctgccaggtctgattggatgccacaggaaatcagtctattggcatgtgattggaatgggcaccactcctgaagtgcactcaatattcctcgaaggtcacacatttcttgtgaggaaccatcgccaggcgtccttggaaatctcgccaataactttccttactgctcaaacactcttgatggaccttggacagtttctactgttttgtcatatctcttcccaccaacatgatggcatggaagcttatgtcaaagtagacagctgtccagaggaaccccaactacgaatgaaaaataatgaagaagcggaagactatgatgatgatcttactgattctgaaatggatgtggtcaggtttgatgatgacaactctccttcctttatccaaattcgctcagttgccaagaagcatcctaaaacttgggtacattacattgctgctgaagaggaggactgggactatgctcccttagtcctcgcccccgatgacagaagttataaaagtcaatatttgaacaatggccctcagcggattggtaggaagtacaaaaaagtccgatttatggcatacacagatgaaacctttaagactcgtgaagctattcagcatgaatcaggaatcttgggacctttactttatggggaagttggagacacactgttgattatatttaagaatcaagcaagcagaccatataacatctaccctcacggaatcactgatgtccgtcctttgtattcaaggagattaccaaaaggtgtaaaacatttgaaggattttccaattctgccaggagaaatattcaaatataaatggacagtgactgtagaagatgggccaactaaatcagatcctcggtgcctgacccgctattactctagtttcgttaatatggagagagatctagcttcaggactcattggccctctcctcatctgctacaaagaatctgtagatcaaagaggaaaccagataatgtcagacaagaggaatgtcatcctgttttctgtatttgatgagaaccgaagctggtacctcacagagaatatacaacgctttctccccaatccagctggagtgcagcttgaggatccagagttccaagcctccaacatcatgcacagcatcaatggctatgtttttgatagtttgcagttgtcagtttgtttgcatgaggtggcatactggtacattctaagcattggagcacagactgacttcctttctgtcttcttctctggatataccttcaaacacaaaatggtctatgaagacacactcaccctattcccattctcaggagaaactgtcttcatgtcgatggaaaacccaggtctatggattctggggtgccacaactcagactttcggaacagaggcatgaccgccttactgaaggtttctagttgtgacaagaacactggtgattattacgaggacagttatgaagatatttcagcatacttgctgagtaaaaacaatgccattgaaccaagaagcttctcccagaattcaagacaccctagcactaggcaaaagcaatttaatgccaccacaattccagaaaatgacatagagaagactgacccttggtttgcacacagaacacctatgcctaaatgtcaaaatgtctcctctagtgatttgttgatgctcttgcgacagagtcctactccacatgggctatccttatctgatctccaagaagccaaatatgagactttttctgatgatccatcacctggagcaatagacagtaataacagcctgtctgaaatgacacacttcaggccacagctccatcacagtggggacatggtatttacccctgagtcaggcctccaattaagattaaatgagaaactggggacaactgcagcaacagagttgaagaaacttgatttcaaagtttctagtacatcaaataatctgatttcaacaattccatcagacaatttggcagcaggtactgataatacaagttccttaggacccccaagtatgccagttcattatgatagtcaattagataccactctatttggcaaaaagtcatctccccttactgagtctggtggacctctgagcctatcctgtcggccccccatggtcaagctggtgtgtcccgctgacaacctgcgggctgaagggctcgagtgtaccaaaacgtgccagaactatgacctggagtgcatgagcatgggctgtgtctctggctgcctctgccccccgggcatggtccggcatgagaacagatgtgtggccctggaaaggtgtccctgcttccatcagggcaaggagtatgcccctggagaaacagtgaagattggctgcaacacttgtgtctgtcgggaccggaagtggaactgcacagaccatgtgtgtgatgccacgtgctccacgatcggcatggcccactacctcaccttcgacgggctcaaatacctgttccccggggagtgccagtacgttctggtgcaggattactgcggcagtaaccctgggacctttcggatcctagtggggaataagggatgcagccacccctcagtgaaatgcaagaaacgggtcaccatcctggtggagggaggagagattgagctgtttgacggggaggtgaatgtgaagaggcccatgaaggatgagactcactttgaggtggtggagtctggccggtacatcattctgctgctgggcaaagccctctccgtggtctgggaccgccacctgagcatctccgtggtcctgaagcagacataccaggagaaagtgtgtggcctgtgtgggaattttgatggcatccagaacaatgacctcaccagcagcaacctccaagtggaggaagaccctgtggactttgggaactcctggaaagtgagctcgcagtgtgctgacaccagaaaagtgcctctggactcatcccctgccacctgccataacaacatcatgaagcagacgatggtggattcctcctgtagaatccttaccagtgacgtcttccaggactgcaacaagctggtggaccccgagccatatctggatgtctgcatttacgacacctgctcctgtgagtccattggggactgcgcctgcttctgcgacaccattgctgcctatgcccacgtgtgtgcccagcatggcaaggtggtgacctggaggacggccacattgtgcccccagagctgcgaggagaggaatctccgggagaacgggtatgagtgtgagtggcgctataacagctgtgcacctgcctgtcaagtcacgtgtcagcaccctgagccactggcctgccctgtgcagtgtgtggagggctgccatgcccactgccctccagggaaaatcctggatgagcttttgcagacctgcgttgaccctgaagactgtccagtgtgtgaggtggctggccggcgttttgcctcaggaaagaaagtcaccttgaatcccagtgaccctgagcactgccagatttgccactgtgatgttgtcaacctcacctgtgaagcctgccaggagccgggaggcctggtggtgcctcccacagatgccccggtgagccccaccactctgtatgtggaggacatctcggaaccgccgttgcacgatttctgataa

SEQ ID NO: 47 - DNA, 2322 bp, Artificial Sequence
  dcFVIII/D'D3-HC light chain
gccaccgatcctcttgcttgggataaccactatggtactcagataccaaaagaagagtggaaatcccaagagaagtcaccagaaaaaacagcttttaagaaaaaggataccattttgtccctgaacgcttgtgaaagcaatcatgcaatagcagcaataaatgagggacaaaataagcccgaaatagaagtcacctgggcaaagcaaggtaggactgaaaggctgtgctctcaaaacccaccagtcttgaaacgccatcaacgggaaataactcgtactactcttcagtcagatcaagaggaaattgactatgatgataccatatcagttgaaatgaagaaggaagattttgacatttatgatgaggatgaaaatcagagcccccgcagctttcaaaagaaaacacgacactattttattgctgcagtggagaggctctgggattatgggatgagtagctccccacatgttctaagaaacagggctcagagtggcagtgtccctcagttcaagaaagttgttttccaggaatttactgatggctcctttactcagcccttataccgtggagaactaaatgaacatttgggactcctggggccatatataagagcagaagttgaagataatatcatggtaactttcagaaatcaggcctctcgtccctattccttctattctagccttatttcttatgaggaagatcagaggcaaggagcagaacctagaaaaaactttgtcaagcctaatgaaaccaaaacttacttttggaaagtgcaacatcatatggcacccactaaagatgagtttgactgcaaagcctgggcttatttctctgatgttgacctggaaaaagatgtgcactcaggcctgattggaccccttctggtctgccacactaacacactgaaccctgctcatgggagacaagtgacagtacaggaatttgctctgtttttcaccatctttgatgagaccaaaagctggtacttcactgaaaatatggaaagaaactgcagggctccctgcaatatccagatggaagatcccacttttaaagagaattatcgcttccatgcaatcaatggctacataatggatacactacctggcttagtaatggctcaggatcaaaggattcgatggtatctgctcagcatgggcagcaatgaaaacatccattctattcatttcagtggacatgtgttcactgtacgaaaaaaagaggagtataaaatggcactgtacaatctctatccaggtgtttttgagacagtggaaatgttaccatccaaagctggaatttggcgggtggaatgccttattggcgagcatctacatgctgggatgagcacactttttctggtgtacagcaataagtgtcagactcccctgggaatggcttctggacacattagagattttcagattacagcttcaggacaatatggacagtgggccccaaagctggccagacttcattattccggatcaatcaatgcctggagcaccaaggagcccttttcttggatcaaggtggatctgttggcaccaatgattattcacggcatcaagacccagggtgcccgtcagaagttctccagcctctacatctctcagtttatcatcatgtatagtcttgatgggaagaagtggcagacttatcgaggaaattccactggaaccttaatggtcttctttggcaatgtggattcatctgggataaaacacaatatttttaaccctccaattattgctcgatacatccgtttgcacccaactcattatagcattcgcagcactcttcgcatggagttgatgggctgtgatttaaatagttgcagcatgccattgggaatggagagtaaagcaatatcagatgcacagattactgcttcatcctactttaccaatatgtttgccacctggtctccttcaaaagctcgacttcacctccaagggaggagtaatgcctggagacctcaggtgaataatccaaaagagtggctgcaagtggacttccagaagacaatgaaagtcacaggagtaactactcagggagtaaaatctctgcttaccagcatgtatgtgaaggagttcctcatctccagcagtcaagatggccatcagtggactctcttttttcagaatggcaaagtaaaggtttttcagggaaatcaagactccttcacacctgtggtgaactctctagacccaccgttactgactcgctaccttcgaattcacccccagagttgggtgcaccagattgccctgaggatggaggttctgggctgcgaggcacaggacctctactgataa

SEQ ID NO: 48 - DNA, 6288 bp, Artificial Sequence
  scFVIII/D'D3-6
gccaccagaagatactacctgggtgcagtggaactgtcatgggactatatgcaaagtgatctcggtgagctgcctgtggacgcaagatttcctcctagagtgccaaaatcttttccattcaacacctcagtcgtgtacaaaaagactctgtttgtagaattcacggatcaccttttcaacatcgctaagccaaggccaccctggatgggtctgctaggtcctaccatccaggctgaggtttatgatacagtggtcattacacttaagaacatggcttcccatcctgtcagtcttcatgctgttggtgtatcctactggaaagcttctgagggagctgaatatgatgatcagaccagtcaaagggagaaagaagatgataaagtcttccctggtggaagccatacatatgtctggcaggtcctgaaagagaatggtccaatggcctctgacccactgtgccttacctactcatatctttctcatgtggacctggtaaaagacttgaattcaggcctcattggagccctactagtatgtagagaagggagtctggccaaggaaaagacacagaccttgcacaaatttatactactttttgctgtatttgatgaagggaaaagttggcactcagaaacaaagaactccttgatgcaggatagggatgctgcatctgctcgggcctggcctaaaatgcacacagtcaatggttatgtaaacaggtctctgccaggtctgattggatgccacaggaaatcagtctattggcatgtgattggaatgggcaccactcctgaagtgcactcaatattcctcgaaggtcacacatttcttgtgaggaaccatcgccaggcgtccttggaaatctcgccaataactttccttactgctcaaacactcttgatggaccttggacagtttctactgttttgtcatatctcttcccaccaacatgatggcatggaagcttatgtcaaagtagacagctgtccagaggaaccccaactacgaatgaaaaataatgaagaagcggaagactatgatgatgatcttactgattctgaaatggatgtggtcaggtttgatgatgacaactctccttcctttatccaaattcgctcagttgccaagaagcatcctaaaacttgggtacattacattgctgctgaagaggaggactgggactatgctcccttagtcctcgcccccgatgacagaagttataaaagtcaatatttgaacaatggccctcagcggattggtaggaagtacaaaaaagtccgatttatggcatacacagatgaaacctttaagactcgtgaagctattcagcatgaatcaggaatcttgggacctttactttatggggaagttggagacacactgttgattatatttaagaatcaagcaagcagaccatataacatctaccctcacggaatcactgatgtccgtcctttgtattcaaggagattaccaaaaggtgtaaaacatttgaaggattttccaattctgccaggagaaatattcaaatataaatggacagtgactgtagaagatgggccaactaaatcagatcctcggtgcctgacccgctattactctagtttcgttaatatggagagagatctagcttcaggactcattggccctctcctcatctgctacaaagaatctgtagatcaaagaggaaaccagataatgtcagacaagaggaatgtcatcctgttttctgtatttgatgagaaccgaagctggtacctcacagagaatatacaacgctttctccccaatccagctggagtgcagcttgaggatccagagttccaagcctccaacatcatgcacagcatcaatggctatgtttttgatagtttgcagttgtcagtttgtttgcatgaggtggcatactggtacattctaagcattggagcacagactgacttcctttctgtcttcttctctggatataccttcaaacacaaaatggtctatgaagacacactcaccctattcccattctcaggagaaactgtcttcatgtcgatggaaaacccaggtctatggattctggggtgccacaactcagactttcggaacagaggcatgaccgccttactgaaggtttctagttgtgacaagaacactggtgattattacgaggacagttatgaagatatttcagcatacttgctgagtaaaaacaatgccattgaaccaagaagcttctcccagaattcaagacaccctagcactaggcaaaagcaatttaatgccaccacaattccagaaaatgacatagagaagactgacccttggtttgcacacagaacacctatgcctaaatgtcaaaatgtctcctctagtgatttgttgatgctcttgcgacagagtcctactccacatgggctatccttatctgatctccaagaagccaaatatgagactttttctgatgatccatcacctggagcaatagacagtaataacagcctgtctgaaatgacacacttcaggccacagctccatcacagtggggacatggtatttacccctgagtcaggcctccaattaagattaaatgagaaactggggacaactgcagcaacagagttgaagaaacttgatttcaaagtttctagtacatcaaataatctgatttcaacaattccatcagacaatttggcagcaggtactgataatacaagtactcttcagtcagatcaagaggaaattgactatgatgataccatatcagttgaaatgaagaaggaagattttgacatttatgatgaggatgaaaatcagagcccccgcagctttcaaaagaaaacacgacactattttattgctgcagtggagaggctctgggattatgggatgagtagctccccacatgttctaagaaacagggctcagagtggcagtgtccctcagttcaagaaagttgttttccaggaatttactgatggctcctttactcagcccttataccgtggagaactaaatgaacatttgggactcctggggccatatataagagcagaagttgaagataatatcatggtaactttcagaaatcaggcctctcgtccctattccttctattctagccttatttcttatgaggaagatcagaggcaaggagcagaacctagaaaaaactttgtcaagcctaatgaaaccaaaacttacttttggaaagtgcaacatcatatggcacccactaaagatgagtttgactgcaaagcctgggcttatttctctgatgttgacctggaaaaagatgtgcactcaggcctgattggaccccttctggtctgccacactaacacactgaaccctgctcatgggagacaagtgacagtacaggaatttgctctgtttttcaccatctttgatgagaccaaaagctggtacttcactgaaaatatggaaagaaactgcagggctccctgcaatatccagatggaagatcccacttttaaagagaattatcgcttccatgcaatcaatggctacataatggatacactacctggcttagtaatggctcaggatcaaaggattcgatggtatctgctcagcatgggcagcaatgaaaacatccattctattcatttcagtggacatgtgttcactgtacgaaaaaaagaggagtataaaatggcactgtacaatctctatccaggtgtttttgagacagtggaaatgttaccatccaaagctggaatttggcgggtggaatgccttattggcgagcatctacatgctgggatgagcacactttttctggtgtacagcaataagtgtcagactcccctgggaatggcttctggacacattagagattttcagattacagcttcaggacaatatggacagtgggccccaaagctggccagacttcattattccggatcaatcaatgcctggagcaccaaggagcccttttcttggatcaaggtggatctgttggcaccaatgattattcacggcatcaagacccagggtgcccgtcagaagttctccagcctctacatctctcagtttatcatcatgtatagtcttgatgggaagaagtggcagacttatcgaggaaattccactggaaccttaatggtcttctttggcaatgtggattcatctgggataaaacacaatatttttaaccctccaattattgctcgatacatccgtttgcacccaactcattatagcattcgcagcactcttcgcatggagttgatgggctgtgatttaaatagttgcagcatgccattgggaatggagagtaaagcaatatcagatgcacagattactgcttcatcctactttaccaatatgtttgccacctggtctccttcaaaagctcgacttcacctccaagggaggagtaatgcctggagacctcaggtgaataatccaaaagagtggctgcaagtggacttccagaagacaatgaaagtcacaggagtaactactcagggagtaaaatctctgcttaccagcatgtatgtgaaggagttcctcatctccagcagtcaagatggccatcagtggactctcttttttcagaatggcaaagtaaaggtttttcagggaaatcaagactccttcacacctgtggtgaactctctagacccaccgttactgactcgctaccttcgaattcacccccagagttgggtgcaccagattgccctgaggatggaggttctgggctgcgaggcacaggacctctacctggttccgcgtggatccagcctatcctgtcggccccccatggtcaagctggtgtgtcccgctgacaacctgcgggctgaagggctcgagtgtaccaaaacgtgccagaactatgacctggagtgcatgagcatgggctgtgtctctggctgcctctgccccccgggcatggtccggcatgagaacagatgtgtggccctggaaaggtgtccctgcttccatcagggcaaggagtatgcccctggagaaacagtgaagattggctgcaacacttgtgtctgtcgggaccggaagtggaactgcacagaccatgtgtgtgatgccacgtgctccacgatcggcatggcccactacctcaccttcgacgggctcaaatacctgttccccggggagtgccagtacgttctggtgcaggattactgcggcagtaaccctgggacctttcggatcctagtggggaataagggatgcagccacccctcagtgaaatgcaagaaacgggtcaccatcctggtggagggaggagagattgagctgtttgacggggaggtgaatgtgaagaggcccatgaaggatgagactcactttgaggtggtggagtctggccggtacatcattctgctgctgggcaaagccctctccgtggtctgggaccgccacctgagcatctccgtggtcctgaagcagacataccaggagaaagtgtgtggcctgtgtgggaattttgatggcatccagaacaatgacctcaccagcagcaacctccaagtggaggaagaccctgtggactttgggaactcctggaaagtgagctcgcagtgtgctgacaccagaaaagtgcctctggactcatcccctgccacctgccataacaacatcatgaagcagacgatggtggattcctcctgtagaatccttaccagtgacgtcttccaggactgcaacaagctggtggaccccgagccatatctggatgtctgcatttacgacacctgctcctgtgagtccattggggactgcgcctgcttctgcgacaccattgctgcctatgcccacgtgtgtgcccagcatggcaaggtggtgacctggaggacggccacattgtgcccccagagctgcgaggagaggaatctccgggagaacgggtatgagtgtgagtggcgctataacagctgtgcacctgcctgtcaagtcacgtgtcagcaccctgagccactggcctgccctgtgcagtgtgtggagggctgccatgcccactgccctccagggaaaatcctggatgagcttttgcagacctgcgttgaccctgaagactgtccagtgtgtgaggtggctggccggcgttttgcctcaggaaagaaagtcaccttgaatcccagtgaccctgagcactgccagatttgccactgtgatgttgtcaacctcacctgtgaagcctgccaggagccgggaggcctggtggtgcctcccacagatgccccggtgagccccaccactctgtatgtggaggacatctcggaaccgccgttgcacgatttctgataa

SEQ ID NO: 49 - DNA, 6300 bp, Artificial Sequence
  scFVIII/D'D3-10
gccaccagaagatactacctgggtgcagtggaactgtcatgggactatatgcaaagtgatctcggtgagctgcctgtggacgcaagatttcctcctagagtgccaaaatcttttccattcaacacctcagtcgtgtacaaaaagactctgtttgtagaattcacggatcaccttttcaacatcgctaagccaaggccaccctggatgggtctgctaggtcctaccatccaggctgaggtttatgatacagtggtcattacacttaagaacatggcttcccatcctgtcagtcttcatgctgttggtgtatcctactggaaagcttctgagggagctgaatatgatgatcagaccagtcaaagggagaaagaagatgataaagtcttccctggtggaagccatacatatgtctggcaggtcctgaaagagaatggtccaatggcctctgacccactgtgccttacctactcatatctttctcatgtggacctggtaaaagacttgaattcaggcctcattggagccctactagtatgtagagaagggagtctggccaaggaaaagacacagaccttgcacaaatttatactactttttgctgtatttgatgaagggaaaagttggcactcagaaacaaagaactccttgatgcaggatagggatgctgcatctgctcgggcctggcctaaaatgcacacagtcaatggttatgtaaacaggtctctgccaggtctgattggatgccacaggaaatcagtctattggcatgtgattggaatgggcaccactcctgaagtgcactcaatattcctcgaaggtcacacatttcttgtgaggaaccatcgccaggcgtccttggaaatctcgccaataactttccttactgctcaaacactcttgatggaccttggacagtttctactgttttgtcatatctcttcccaccaacatgatggcatggaagcttatgtcaaagtagacagctgtccagaggaaccccaactacgaatgaaaaataatgaagaagcggaagactatgatgatgatcttactgattctgaaatggatgtggtcaggtttgatgatgacaactctccttcctttatccaaattcgctcagttgccaagaagcatcctaaaacttgggtacattacattgctgctgaagaggaggactgggactatgctcccttagtcctcgcccccgatgacagaagttataaaagtcaatatttgaacaatggccctcagcggattggtaggaagtacaaaaaagtccgatttatggcatacacagatgaaacctttaagactcgtgaagctattcagcatgaatcaggaatcttgggacctttactttatggggaagttggagacacactgttgattatatttaagaatcaagcaagcagaccatataacatctaccctcacggaatcactgatgtccgtcctttgtattcaaggagattaccaaaaggtgtaaaacatttgaaggattttccaattctgccaggagaaatattcaaatataaatggacagtgactgtagaagatgggccaactaaatcagatcctcggtgcctgacccgctattactctagtttcgttaatatggagagagatctagcttcaggactcattggccctctcctcatctgctacaaagaatctgtagatcaaagaggaaaccagataatgtcagacaagaggaatgtcatcctgttttctgtatttgatgagaaccgaagctggtacctcacagagaatatacaacgctttctccccaatccagctggagtgcagcttgaggatccagagttccaagcctccaacatcatgcacagcatcaatggctatgtttttgatagtttgcagttgtcagtttgtttgcatgaggtggcatactggtacattctaagcattggagcacagactgacttcctttctgtcttcttctctggatataccttcaaacacaaaatggtctatgaagacacactcaccctattcccattctcaggagaaactgtcttcatgtcgatggaaaacccaggtctatggattctggggtgccacaactcagactttcggaacagaggcatgaccgccttactgaaggtttctagttgtgacaagaacactggtgattattacgaggacagttatgaagatatttcagcatacttgctgagtaaaaacaatgccattgaaccaagaagcttctcccagaattcaagacaccctagcactaggcaaaagcaatttaatgccaccacaattccagaaaatgacatagagaagactgacccttggtttgcacacagaacacctatgcctaaatgtcaaaatgtctcctctagtgatttgttgatgctcttgcgacagagtcctactccacatgggctatccttatctgatctccaagaagccaaatatgagactttttctgatgatccatcacctggagcaatagacagtaataacagcctgtctgaaatgacacacttcaggccacagctccatcacagtggggacatggtatttacccctgagtcaggcctccaattaagattaaatgagaaactggggacaactgcagcaacagagttgaagaaacttgatttcaaagtttctagtacatcaaataatctgatttcaacaattccatcagacaatttggcagcaggtactgataatacaagtactcttcagtcagatcaagaggaaattgactatgatgataccatatcagttgaaatgaagaaggaagattttgacatttatgatgaggatgaaaatcagagcccccgcagctttcaaaagaaaacacgacactattttattgctgcagtggagaggctctgggattatgggatgagtagctccccacatgttctaagaaacagggctcagagtggcagtgtccctcagttcaagaaagttgttttccaggaatttactgatggctcctttactcagcccttataccgtggagaactaaatgaacatttgggactcctggggccatatataagagcagaagttgaagataatatcatggtaactttcagaaatcaggcctctcgtccctattccttctattctagccttatttcttatgaggaagatcagaggcaaggagcagaacctagaaaaaactttgtcaagcctaatgaaaccaaaacttacttttggaaagtgcaacatcatatggcacccactaaagatgagtttgactgcaaagcctgggcttatttctctgatgttgacctggaaaaagatgtgcactcaggcctgattggaccccttctggtctgccacactaacacactgaaccctgctcatgggagacaagtgacagtacaggaatttgctctgtttttcaccatctttgatgagaccaaaagctggtacttcactgaaaatatggaaagaaactgcagggctccctgcaatatccagatggaagatcccacttttaaagagaattatcgcttccatgcaatcaatggctacataatggatacactacctggcttagtaatggctcaggatcaaaggattcgatggtatctgctcagcatgggcagcaatgaaaacatccattctattcatttcagtggacatgtgttcactgtacgaaaaaaagaggagtataaaatggcactgtacaatctctatccaggtgtttttgagacagtggaaatgttaccatccaaagctggaatttggcgggtggaatgccttattggcgagcatctacatgctgggatgagcacactttttctggtgtacagcaataagtgtcagactcccctgggaatggcttctggacacattagagattttcagattacagcttcaggacaatatggacagtgggccccaaagctggccagacttcattattccggatcaatcaatgcctggagcaccaaggagcccttttcttggatcaaggtggatctgttggcaccaatgattattcacggcatcaagacccagggtgcccgtcagaagttctccagcctctacatctctcagtttatcatcatgtatagtcttgatgggaagaagtggcagacttatcgaggaaattccactggaaccttaatggtcttctttggcaatgtggattcatctgggataaaacacaatatttttaaccctccaattattgctcgatacatccgtttgcacccaactcattatagcattcgcagcactcttcgcatggagttgatgggctgtgatttaaatagttgcagcatgccattgggaatggagagtaaagcaatatcagatgcacagattactgcttcatcctactttaccaatatgtttgccacctggtctccttcaaaagctcgacttcacctccaagggaggagtaatgcctggagacctcaggtgaataatccaaaagagtggctgcaagtggacttccagaagacaatgaaagtcacaggagtaactactcagggagtaaaatctctgcttaccagcatgtatgtgaaggagttcctcatctccagcagtcaagatggccatcagtggactctcttttttcagaatggcaaagtaaaggtttttcagggaaatcaagactccttcacacctgtggtgaactctctagacccaccgttactgactcgctaccttcgaattcacccccagagttgggtgcaccagattgccctgaggatggaggttctgggctgcgaggcacaggacctctacctggttccgcgtggatccgggggtggaggtagcctatcctgtcggccccccatggtcaagctggtgtgtcccgctgacaacctgcgggctgaagggctcgagtgtaccaaaacgtgccagaactatgacctggagtgcatgagcatgggctgtgtctctggctgcctctgccccccgggcatggtccggcatgagaacagatgtgtggccctggaaaggtgtccctgcttccatcagggcaaggagtatgcccctggagaaacagtgaagattggctgcaacacttgtgtctgtcgggaccggaagtggaactgcacagaccatgtgtgtgatgccacgtgctccacgatcggcatggcccactacctcaccttcgacgggctcaaatacctgttccccggggagtgccagtacgttctggtgcaggattactgcggcagtaaccctgggacctttcggatcctagtggggaataagggatgcagccacccctcagtgaaatgcaagaaacgggtcaccatcctggtggagggaggagagattgagctgtttgacggggaggtgaatgtgaagaggcccatgaaggatgagactcactttgaggtggtggagtctggccggtacatcattctgctgctgggcaaagccctctccgtggtctgggaccgccacctgagcatctccgtggtcctgaagcagacataccaggagaaagtgtgtggcctgtgtgggaattttgatggcatccagaacaatgacctcaccagcagcaacctccaagtggaggaagaccctgtggactttgggaactcctggaaagtgagctcgcagtgtgctgacaccagaaaagtgcctctggactcatcccctgccacctgccataacaacatcatgaagcagacgatggtggattcctcctgtagaatccttaccagtgacgtcttccaggactgcaacaagctggtggaccccgagccatatctggatgtctgcatttacgacacctgctcctgtgagtccattggggactgcgcctgcttctgcgacaccattgctgcctatgcccacgtgtgtgcccagcatggcaaggtggtgacctggaggacggccacattgtgcccccagagctgcgaggagaggaatctccgggagaacgggtatgagtgtgagtggcgctataacagctgtgcacctgcctgtcaagtcacgtgtcagcaccctgagccactggcctgccctgtgcagtgtgtggagggctgccatgcccactgccctccagggaaaatcctggatgagcttttgcagacctgcgttgaccctgaagactgtccagtgtgtgaggtggctggccggcgttttgcctcaggaaagaaagtcaccttgaatcccagtgaccctgagcactgccagatttgccactgtgatgttgtcaacctcacctgtgaagcctgccaggagccgggaggcctggtggtgcctcccacagatgccccggtgagccccaccactctgtatgtggaggacatctcggaaccgccgttgcacgatttctgataa

SEQ ID NO: 50 - DNA, 6330 bp, Artificial Sequence
  scFVIII/D'D3-20
gccaccagaagatactacctgggtgcagtggaactgtcatgggactatatgcaaagtgatctcggtgagctgcctgtggacgcaagatttcctcctagagtgccaaaatcttttccattcaacacctcagtcgtgtacaaaaagactctgtttgtagaattcacggatcaccttttcaacatcgctaagccaaggccaccctggatgggtctgctaggtcctaccatccaggctgaggtttatgatacagtggtcattacacttaagaacatggcttcccatcctgtcagtcttcatgctgttggtgtatcctactggaaagcttctgagggagctgaatatgatgatcagaccagtcaaagggagaaagaagatgataaagtcttccctggtggaagccatacatatgtctggcaggtcctgaaagagaatggtccaatggcctctgacccactgtgccttacctactcatatctttctcatgtggacctggtaaaagacttgaattcaggcctcattggagccctactagtatgtagagaagggagtctggccaaggaaaagacacagaccttgcacaaatttatactactttttgctgtatttgatgaagggaaaagttggcactcagaaacaaagaactccttgatgcaggatagggatgctgcatctgctcgggcctggcctaaaatgcacacagtcaatggttatgtaaacaggtctctgccaggtctgattggatgccacaggaaatcagtctattggcatgtgattggaatgggcaccactcctgaagtgcactcaatattcctcgaaggtcacacatttcttgtgaggaaccatcgccaggcgtccttggaaatctcgccaataactttccttactgctcaaacactcttgatggaccttggacagtttctactgttttgtcatatctcttcccaccaacatgatggcatggaagcttatgtcaaagtagacagctgtccagaggaaccccaactacgaatgaaaaataatgaagaagcggaagactatgatgatgatcttactgattctgaaatggatgtggtcaggtttgatgatgacaactctccttcctttatccaaattcgctcagttgccaagaagcatcctaaaacttgggtacattacattgctgctgaagaggaggactgggactatgctcccttagtcctcgcccccgatgacagaagttataaaagtcaatatttgaacaatggccctcagcggattggtaggaagtacaaaaaagtccgatttatggcatacacagatgaaacctttaagactcgtgaagctattcagcatgaatcaggaatcttgggacctttactttatggggaagttggagacacactgttgattatatttaagaatcaagcaagcagaccatataacatctaccctcacggaatcactgatgtccgtcctttgtattcaaggagattaccaaaaggtgtaaaacatttgaaggattttccaattctgccaggagaaatattcaaatataaatggacagtgactgtagaagatgggccaactaaatcagatcctcggtgcctgacccgctattactctagtttcgttaatatggagagagatctagcttcaggactcattggccctctcctcatctgctacaaagaatctgtagatcaaagaggaaaccagataatgtcagacaagaggaatgtcatcctgttttctgtatttgatgagaaccgaagctggtacctcacagagaatatacaacgctttctccccaatccagctggagtgcagcttgaggatccagagttccaagcctccaacatcatgcacagcatcaatggctatgtttttgatagtttgcagttgtcagtttgtttgcatgaggtggcatactggtacattctaagcattggagcacagactgacttcctttctgtcttcttctctggatataccttcaaacacaaaatggtctatgaagacacactcaccctattcccattctcaggagaaactgtcttcatgtcgatggaaaacccaggtctatggattctggggtgccacaactcagactttcggaacagaggcatgaccgccttactgaaggtttctagttgtgacaagaacactggtgattattacgaggacagttatgaagatatttcagcatacttgctgagtaaaaacaatgccattgaaccaagaagcttctcccagaattcaagacaccctagcactaggcaaaagcaatttaatgccaccacaattccagaaaatgacatagagaagactgacccttggtttgcacacagaacacctatgcctaaatgtcaaaatgtctcctctagtgatttgttgatgctcttgcgacagagtcctactccacatgggctatccttatctgatctccaagaagccaaatatgagactttttctgatgatccatcacctggagcaatagacagtaataacagcctgtctgaaatgacacacttcaggccacagctccatcacagtggggacatggtatttacccctgagtcaggcctccaattaagattaaatgagaaactggggacaactgcagcaacagagttgaagaaacttgatttcaaagtttctagtacatcaaataatctgatttcaacaattccatcagacaatttggcagcaggtactgataatacaagtactcttcagtcagatcaagaggaaattgactatgatgataccatatcagttgaaatgaagaaggaagattttgacatttatgatgaggatgaaaatcagagcccccgcagctttcaaaagaaaacacgacactattttattgctgcagtggagaggctctgggattatgggatgagtagctccccacatgttctaagaaacagggctcagagtggcagtgtccctcagttcaagaaagttgttttccaggaatttactgatggctcctttactcagcccttataccgtggagaactaaatgaacatttgggactcctggggccatatataagagcagaagttgaagataatatcatggtaactttcagaaatcaggcctctcgtccctattccttctattctagccttatttcttatgaggaagatcagaggcaaggagcagaacctagaaaaaactttgtcaagcctaatgaaaccaaaacttacttttggaaagtgcaacatcatatggcacccactaaagatgagtttgactgcaaagcctgggcttatttctctgatgttgacctggaaaaagatgtgcactcaggcctgattggaccccttctggtctgccacactaacacactgaaccctgctcatgggagacaagtgacagtacaggaatttgctctgtttttcaccatctttgatgagaccaaaagctggtacttcactgaaaatatggaaagaaactgcagggctccctgcaatatccagatggaagatcccacttttaaagagaattatcgcttccatgcaatcaatggctacataatggatacactacctggcttagtaatggctcaggatcaaaggattcgatggtatctgctcagcatgggcagcaatgaaaacatccattctattcatttcagtggacatgtgttcactgtacgaaaaaaagaggagtataaaatggcactgtacaatctctatccaggtgtttttgagacagtggaaatgttaccatccaaagctggaatttggcgggtggaatgccttattggcgagcatctacatgctgggatgagcacactttttctggtgtacagcaataagtgtcagactcccctgggaatggcttctggacacattagagattttcagattacagcttcaggacaatatggacagtgggccccaaagctggccagacttcattattccggatcaatcaatgcctggagcaccaaggagcccttttcttggatcaaggtggatctgttggcaccaatgattattcacggcatcaagacccagggtgcccgtcagaagttctccagcctctacatctctcagtttatcatcatgtatagtcttgatgggaagaagtggcagacttatcgaggaaattccactggaaccttaatggtcttctttggcaatgtggattcatctgggataaaacacaatatttttaaccctccaattattgctcgatacatccgtttgcacccaactcattatagcattcgcagcactcttcgcatggagttgatgggctgtgatttaaatagttgcagcatgccattgggaatggagagtaaagcaatatcagatgcacagattactgcttcatcctactttaccaatatgtttgccacctggtctccttcaaaagctcgacttcacctccaagggaggagtaatgcctggagacctcaggtgaataatccaaaagagtggctgcaagtggacttccagaagacaatgaaagtcacaggagtaactactcagggagtaaaatctctgcttaccagcatgtatgtgaaggagttcctcatctccagcagtcaagatggccatcagtggactctcttttttcagaatggcaaagtaaaggtttttcagggaaatcaagactccttcacacctgtggtgaactctctagacccaccgttactgactcgctaccttcgaattcacccccagagttgggtgcaccagattgccctgaggatggaggttctgggctgcgaggcacaggacctctacctggttccgcgtggatccgggggtggaggttcaggaggtggaggttcaggaggtggaggtagcctatcctgtcggccccccatggtcaagctggtgtgtcccgctgacaacctgcgggctgaagggctcgagtgtaccaaaacgtgccagaactatgacctggagtgcatgagcatgggctgtgtctctggctgcctctgccccccgggcatggtccggcatgagaacagatgtgtggccctggaaaggtgtccctgcttccatcagggcaaggagtatgcccctggagaaacagtgaagattggctgcaacacttgtgtctgtcgggaccggaagtggaactgcacagaccatgtgtgtgatgccacgtgctccacgatcggcatggcccactacctcaccttcgacgggctcaaatacctgttccccggggagtgccagtacgttctggtgcaggattactgcggcagtaaccctgggacctttcggatcctagtggggaataagggatgcagccacccctcagtgaaatgcaagaaacgggtcaccatcctggtggagggaggagagattgagctgtttgacggggaggtgaatgtgaagaggcccatgaaggatgagactcactttgaggtggtggagtctggccggtacatcattctgctgctgggcaaagccctctccgtggtctgggaccgccacctgagcatctccgtggtcctgaagcagacataccaggagaaagtgtgtggcctgtgtgggaattttgatggcatccagaacaatgacctcaccagcagcaacctccaagtggaggaagaccctgtggactttgggaactcctggaaagtgagctcgcagtgtgctgacaccagaaaagtgcctctggactcatcccctgccacctgccataacaacatcatgaagcagacgatggtggattcctcctgtagaatccttaccagtgacgtcttccaggactgcaacaagctggtggaccccgagccatatctggatgtctgcatttacgacacctgctcctgtgagtccattggggactgcgcctgcttctgcgacaccattgctgcctatgcccacgtgtgtgcccagcatggcaaggtggtgacctggaggacggccacattgtgcccccagagctgcgaggagaggaatctccgggagaacgggtatgagtgtgagtggcgctataacagctgtgcacctgcctgtcaagtcacgtgtcagcaccctgagccactggcctgccctgtgcagtgtgtggagggctgccatgcccactgccctccagggaaaatcctggatgagcttttgcagacctgcgttgaccctgaagactgtccagtgtgtgaggtggctggccggcgttttgcctcaggaaagaaagtcaccttgaatcccagtgaccctgagcactgccagatttgccactgtgatgttgtcaacctcacctgtgaagcctgccaggagccgggaggcctggtggtgcctcccacagatgccccggtgagccccaccactctgtatgtggaggacatctcggaaccgccgttgcacgatttctgataa

SEQ ID NO: 51 - DNA, 6360 bp, Artificial Sequence
  scFVIII/D'D3-30
gccaccagaagatactacctgggtgcagtggaactgtcatgggactatatgcaaagtgatctcggtgagctgcctgtggacgcaagatttcctcctagagtgccaaaatcttttccattcaacacctcagtcgtgtacaaaaagactctgtttgtagaattcacggatcaccttttcaacatcgctaagccaaggccaccctggatgggtctgctaggtcctaccatccaggctgaggtttatgatacagtggtcattacacttaagaacatggcttcccatcctgtcagtcttcatgctgttggtgtatcctactggaaagcttctgagggagctgaatatgatgatcagaccagtcaaagggagaaagaagatgataaagtcttccctggtggaagccatacatatgtctggcaggtcctgaaagagaatggtccaatggcctctgacccactgtgccttacctactcatatctttctcatgtggacctggtaaaagacttgaattcaggcctcattggagccctactagtatgtagagaagggagtctggccaaggaaaagacacagaccttgcacaaatttatactactttttgctgtatttgatgaagggaaaagttggcactcagaaacaaagaactccttgatgcaggatagggatgctgcatctgctcgggcctggcctaaaatgcacacagtcaatggttatgtaaacaggtctctgccaggtctgattggatgccacaggaaatcagtctattggcatgtgattggaatgggcaccactcctgaagtgcactcaatattcctcgaaggtcacacatttcttgtgaggaaccatcgccaggcgtccttggaaatctcgccaataactttccttactgctcaaacactcttgatggaccttggacagtttctactgttttgtcatatctcttcccaccaacatgatggcatggaagcttatgtcaaagtagacagctgtccagaggaaccccaactacgaatgaaaaataatgaagaagcggaagactatgatgatgatcttactgattctgaaatggatgtggtcaggtttgatgatgacaactctccttcctttatccaaattcgctcagttgccaagaagcatcctaaaacttgggtacattacattgctgctgaagaggaggactgggactatgctcccttagtcctcgcccccgatgacagaagttataaaagtcaatatttgaacaatggccctcagcggattggtaggaagtacaaaaaagtccgatttatggcatacacagatgaaacctttaagactcgtgaagctattcagcatgaatcaggaatcttgggacctttactttatggggaagttggagacacactgttgattatatttaagaatcaagcaagcagaccatataacatctaccctcacggaatcactgatgtccgtcctttgtattcaaggagattaccaaaaggtgtaaaacatttgaaggattttccaattctgccaggagaaatattcaaatataaatggacagtgactgtagaagatgggccaactaaatcagatcctcggtgcctgacccgctattactctagtttcgttaatatggagagagatctagcttcaggactcattggccctctcctcatctgctacaaagaatctgtagatcaaagaggaaaccagataatgtcagacaagaggaatgtcatcctgttttctgtatttgatgagaaccgaagctggtacctcacagagaatatacaacgctttctccccaatccagctggagtgcagcttgaggatccagagttccaagcctccaacatcatgcacagcatcaatggctatgtttttgatagtttgcagttgtcagtttgtttgcatgaggtggcatactggtacattctaagcattggagcacagactgacttcctttctgtcttcttctctggatataccttcaaacacaaaatggtctatgaagacacactcaccctattcccattctcaggagaaactgtcttcatgtcgatggaaaacccaggtctatggattctggggtgccacaactcagactttcggaacagaggcatgaccgccttactgaaggtttctagttgtgacaagaacactggtgattattacgaggacagttatgaagatatttcagcatacttgctgagtaaaaacaatgccattgaaccaagaagcttctcccagaattcaagacaccctagcactaggcaaaagcaatttaatgccaccacaattccagaaaatgacatagagaagactgacccttggtttgcacacagaacacctatgcctaaatgtcaaaatgtctcctctagtgatttgttgatgctcttgcgacagagtcctactccacatgggctatccttatctgatctccaagaagccaaatatgagactttttctgatgatccatcacctggagcaatagacagtaataacagcctgtctgaaatgacacacttcaggccacagctccatcacagtggggacatggtatttacccctgagtcaggcctccaattaagattaaatgagaaactggggacaactgcagcaacagagttgaagaaacttgatttcaaagtttctagtacatcaaataatctgatttcaacaattccatcagacaatttggcagcaggtactgataatacaagtactcttcagtcagatcaagaggaaattgactatgatgataccatatcagttgaaatgaagaaggaagattttgacatttatgatgaggatgaaaatcagagcccccgcagctttcaaaagaaaacacgacactattttattgctgcagtggagaggctctgggattatgggatgagtagctccccacatgttctaagaaacagggctcagagtggcagtgtccctcagttcaagaaagttgttttccaggaatttactgatggctcctttactcagcccttataccgtggagaactaaatgaacatttgggactcctggggccatatataagagcagaagttgaagataatatcatggtaactttcagaaatcaggcctctcgtccctattccttctattctagccttatttcttatgaggaagatcagaggcaaggagcagaacctagaaaaaactttgtcaagcctaatgaaaccaaaacttacttttggaaagtgcaacatcatatggcacccactaaagatgagtttgactgcaaagcctgggcttatttctctgatgttgacctggaaaaagatgtgcactcaggcctgattggaccccttctggtctgccacactaacacactgaaccctgctcatgggagacaagtgacagtacaggaatttgctctgtttttcaccatctttgatgagaccaaaagctggtacttcactgaaaatatggaaagaaactgcagggctccctgcaatatccagatggaagatcccacttttaaagagaattatcgcttccatgcaatcaatggctacataatggatacactacctggcttagtaatggctcaggatcaaaggattcgatggtatctgctcagcatgggcagcaatgaaaacatccattctattcatttcagtggacatgtgttcactgtacgaaaaaaagaggagtataaaatggcactgtacaatctctatccaggtgtttttgagacagtggaaatgttaccatccaaagctggaatttggcgggtggaatgccttattggcgagcatctacatgctgggatgagcacactttttctggtgtacagcaataagtgtcagactcccctgggaatggcttctggacacattagagattttcagattacagcttcaggacaatatggacagtgggccccaaagctggccagacttcattattccggatcaatcaatgcctggagcaccaaggagcccttttcttggatcaaggtggatctgttggcaccaatgattattcacggcatcaagacccagggtgcccgtcagaagttctccagcctctacatctctcagtttatcatcatgtatagtcttgatgggaagaagtggcagacttatcgaggaaattccactggaaccttaatggtcttctttggcaatgtggattcatctgggataaaacacaatatttttaaccctccaattattgctcgatacatccgtttgcacccaactcattatagcattcgcagcactcttcgcatggagttgatgggctgtgatttaaatagttgcagcatgccattgggaatggagagtaaagcaatatcagatgcacagattactgcttcatcctactttaccaatatgtttgccacctggtctccttcaaaagctcgacttcacctccaagggaggagtaatgcctggagacctcaggtgaataatccaaaagagtggctgcaagtggacttccagaagacaatgaaagtcacaggagtaactactcagggagtaaaatctctgcttaccagcatgtatgtgaaggagttcctcatctccagcagtcaagatggccatcagtggactctcttttttcagaatggcaaagtaaaggtttttcagggaaatcaagactccttcacacctgtggtgaactctctagacccaccgttactgactcgctaccttcgaattcacccccagagttgggtgcaccagattgccctgaggatggaggttctgggctgcgaggcacaggacctctacctggttccgcgtggatccgggggtggaggttcaggaggtggaggttcaggaggtggaggttcaggaggtggaggttcaggaggtggaggtagcctatcctgtcggccccccatggtcaagctggtgtgtcccgctgacaacctgcgggctgaagggctcgagtgtaccaaaacgtgccagaactatgacctggagtgcatgagcatgggctgtgtctctggctgcctctgccccccgggcatggtccggcatgagaacagatgtgtggccctggaaaggtgtccctgcttccatcagggcaaggagtatgcccctggagaaacagtgaagattggctgcaacacttgtgtctgtcgggaccggaagtggaactgcacagaccatgtgtgtgatgccacgtgctccacgatcggcatggcccactacctcaccttcgacgggctcaaatacctgttccccggggagtgccagtacgttctggtgcaggattactgcggcagtaaccctgggacctttcggatcctagtggggaataagggatgcagccacccctcagtgaaatgcaagaaacgggtcaccatcctggtggagggaggagagattgagctgtttgacggggaggtgaatgtgaagaggcccatgaaggatgagactcactttgaggtggtggagtctggccggtacatcattctgctgctgggcaaagccctctccgtggtctgggaccgccacctgagcatctccgtggtcctgaagcagacataccaggagaaagtgtgtggcctgtgtgggaattttgatggcatccagaacaatgacctcaccagcagcaacctccaagtggaggaagaccctgtggactttgggaactcctggaaagtgagctcgcagtgtgctgacaccagaaaagtgcctctggactcatcccctgccacctgccataacaacatcatgaagcagacgatggtggattcctcctgtagaatccttaccagtgacgtcttccaggactgcaacaagctggtggaccccgagccatatctggatgtctgcatttacgacacctgctcctgtgagtccattggggactgcgcctgcttctgcgacaccattgctgcctatgcccacgtgtgtgcccagcatggcaaggtggtgacctggaggacggccacattgtgcccccagagctgcgaggagaggaatctccgggagaacgggtatgagtgtgagtggcgctataacagctgtgcacctgcctgtcaagtcacgtgtcagcaccctgagccactggcctgccctgtgcagtgtgtggagggctgccatgcccactgccctccagggaaaatcctggatgagcttttgcagacctgcgttgaccctgaagactgtccagtgtgtgaggtggctggccggcgttttgcctcaggaaagaaagtcaccttgaatcccagtgaccctgagcactgccagatttgccactgtgatgttgtcaacctcacctgtgaagcctgccaggagccgggaggcctggtggtgcctcccacagatgccccggtgagccccaccactctgtatgtggaggacatctcggaaccgccgttgcacgatttctgataa

SEQ ID NO: 52 - DNA, 6390 bp, Artificial Sequence
  scFVIII/D'D3-40
gccaccagaagatactacctgggtgcagtggaactgtcatgggactatatgcaaagtgatctcggtgagctgcctgtggacgcaagatttcctcctagagtgccaaaatcttttccattcaacacctcagtcgtgtacaaaaagactctgtttgtagaattcacggatcaccttttcaacatcgctaagccaaggccaccctggatgggtctgctaggtcctaccatccaggctgaggtttatgatacagtggtcattacacttaagaacatggcttcccatcctgtcagtcttcatgctgttggtgtatcctactggaaagcttctgagggagctgaatatgatgatcagaccagtcaaagggagaaagaagatgataaagtcttccctggtggaagccatacatatgtctggcaggtcctgaaagagaatggtccaatggcctctgacccactgtgccttacctactcatatctttctcatgtggacctggtaaaagacttgaattcaggcctcattggagccctactagtatgtagagaagggagtctggccaaggaaaagacacagaccttgcacaaatttatactactttttgctgtatttgatgaagggaaaagttggcactcagaaacaaagaactccttgatgcaggatagggatgctgcatctgctcgggcctggcctaaaatgcacacagtcaatggttatgtaaacaggtctctgccaggtctgattggatgccacaggaaatcagtctattggcatgtgattggaatgggcaccactcctgaagtgcactcaatattcctcgaaggtcacacatttcttgtgaggaaccatcgccaggcgtccttggaaatctcgccaataactttccttactgctcaaacactcttgatggaccttggacagtttctactgttttgtcatatctcttcccaccaacatgatggcatggaagcttatgtcaaagtagacagctgtccagaggaaccccaactacgaatgaaaaataatgaagaagcggaagactatgatgatgatcttactgattctgaaatggatgtggtcaggtttgatgatgacaactctccttcctttatccaaattcgctcagttgccaagaagcatcctaaaacttgggtacattacattgctgctgaagaggaggactgggactatgctcccttagtcctcgcccccgatgacagaagttataaaagtcaatatttgaacaatggccctcagcggattggtaggaagtacaaaaaagtccgatttatggcatacacagatgaaacctttaagactcgtgaagctattcagcatgaatcaggaatcttgggacctttactttatggggaagttggagacacactgttgattatatttaagaatcaagcaagcagaccatataacatctaccctcacggaatcactgatgtccgtcctttgtattcaaggagattaccaaaaggtgtaaaacatttgaaggattttccaattctgccaggagaaatattcaaatataaatggacagtgactgtagaagatgggccaactaaatcagatcctcggtgcctgacccgctattactctagtttcgttaatatggagagagatctagcttcaggactcattggccctctcctcatctgctacaaagaatctgtagatcaaagaggaaaccagataatgtcagacaagaggaatgtcatcctgttttctgtatttgatgagaaccgaagctggtacctcacagagaatatacaacgctttctccccaatccagctggagtgcagcttgaggatccagagttccaagcctccaacatcatgcacagcatcaatggctatgtttttgatagtttgcagttgtcagtttgtttgcatgaggtggcatactggtacattctaagcattggagcacagactgacttcctttctgtcttcttctctggatataccttcaaacacaaaatggtctatgaagacacactcaccctattcccattctcaggagaaactgtcttcatgtcgatggaaaacccaggtctatggattctggggtgccacaactcagactttcggaacagaggcatgaccgccttactgaaggtttctagttgtgacaagaacactggtgattattacgaggacagttatgaagatatttcagcatacttgctgagtaaaaacaatgccattgaaccaagaagcttctcccagaattcaagacaccctagcactaggcaaaagcaatttaatgccaccacaattccagaaaatgacatagagaagactgacccttggtttgcacacagaacacctatgcctaaatgtcaaaatgtctcctctagtgatttgttgatgctcttgcgacagagtcctactccacatgggctatccttatctgatctccaagaagccaaatatgagactttttctgatgatccatcacctggagcaatagacagtaataacagcctgtctgaaatgacacacttcaggccacagctccatcacagtggggacatggtatttacccctgagtcaggcctccaattaagattaaatgagaaactggggacaactgcagcaacagagttgaagaaacttgatttcaaagtttctagtacatcaaataatctgatttcaacaattccatcagacaatttggcagcaggtactgataatacaagtactcttcagtcagatcaagaggaaattgactatgatgataccatatcagttgaaatgaagaaggaagattttgacatttatgatgaggatgaaaatcagagcccccgcagctttcaaaagaaaacacgacactattttattgctgcagtggagaggctctgggattatgggatgagtagctccccacatgttctaagaaacagggctcagagtggcagtgtccctcagttcaagaaagttgttttccaggaatttactgatggctcctttactcagcccttataccgtggagaactaaatgaacatttgggactcctggggccatatataagagcagaagttgaagataatatcatggtaactttcagaaatcaggcctctcgtccctattccttctattctagccttatttcttatgaggaagatcagaggcaaggagcagaacctagaaaaaactttgtcaagcctaatgaaaccaaaacttacttttggaaagtgcaacatcatatggcacccactaaagatgagtttgactgcaaagcctgggcttatttctctgatgttgacctggaaaaagatgtgcactcaggcctgattggaccccttctggtctgccacactaacacactgaaccctgctcatgggagacaagtgacagtacaggaatttgctctgtttttcaccatctttgatgagaccaaaagctggtacttcactgaaaatatggaaagaaactgcagggctccctgcaatatccagatggaagatcccacttttaaagagaattatcgcttccatgcaatcaatggctacataatggatacactacctggcttagtaatggctcaggatcaaaggattcgatggtatctgctcagcatgggcagcaatgaaaacatccattctattcatttcagtggacatgtgttcactgtacgaaaaaaagaggagtataaaatggcactgtacaatctctatccaggtgtttttgagacagtggaaatgttaccatccaaagctggaatttggcgggtggaatgccttattggcgagcatctacatgctgggatgagcacactttttctggtgtacagcaataagtgtcagactcccctgggaatggcttctggacacattagagattttcagattacagcttcaggacaatatggacagtgggccccaaagctggccagacttcattattccggatcaatcaatgcctggagcaccaaggagcccttttcttggatcaaggtggatctgttggcaccaatgattattcacggcatcaagacccagggtgcccgtcagaagttctccagcctctacatctctcagtttatcatcatgtatagtcttgatgggaagaagtggcagacttatcgaggaaattccactggaaccttaatggtcttctttggcaatgtggattcatctgggataaaacacaatatttttaaccctccaattattgctcgatacatccgtttgcacccaactcattatagcattcgcagcactcttcgcatggagttgatgggctgtgatttaaatagttgcagcatgccattgggaatggagagtaaagcaatatcagatgcacagattactgcttcatcctactttaccaatatgtttgccacctggtctccttcaaaagctcgacttcacctccaagggaggagtaatgcctggagacctcaggtgaataatccaaaagagtggctgcaagtggacttccagaagacaatgaaagtcacaggagtaactactcagggagtaaaatctctgcttaccagcatgtatgtgaaggagttcctcatctccagcagtcaagatggccatcagtggactctcttttttcagaatggcaaagtaaaggtttttcagggaaatcaagactccttcacacctgtggtgaactctctagacccaccgttactgactcgctaccttcgaattcacccccagagttgggtgcaccagattgccctgaggatggaggttctgggctgcgaggcacaggacctctacctggttccgcgtggatccgggggtggaggttcaggaggtggaggttcaggaggtggaggttcaggaggtggaggttcaggaggtggaggttcaggaggtggaggttcaggaggtggaggtagcctatcctgtcggccccccatggtcaagctggtgtgtcccgctgacaacctgcgggctgaagggctcgagtgtaccaaaacgtgccagaactatgacctggagtgcatgagcatgggctgtgtctctggctgcctctgccccccgggcatggtccggcatgagaacagatgtgtggccctggaaaggtgtccctgcttccatcagggcaaggagtatgcccctggagaaacagtgaagattggctgcaacacttgtgtctgtcgggaccggaagtggaactgcacagaccatgtgtgtgatgccacgtgctccacgatcggcatggcccactacctcaccttcgacgggctcaaatacctgttccccggggagtgccagtacgttctggtgcaggattactgcggcagtaaccctgggacctttcggatcctagtggggaataagggatgcagccacccctcagtgaaatgcaagaaacgggtcaccatcctggtggagggaggagagattgagctgtttgacggggaggtgaatgtgaagaggcccatgaaggatgagactcactttgaggtggtggagtctggccggtacatcattctgctgctgggcaaagccctctccgtggtctgggaccgccacctgagcatctccgtggtcctgaagcagacataccaggagaaagtgtgtggcctgtgtgggaattttgatggcatccagaacaatgacctcaccagcagcaacctccaagtggaggaagaccctgtggactttgggaactcctggaaagtgagctcgcagtgtgctgacaccagaaaagtgcctctggactcatcccctgccacctgccataacaacatcatgaagcagacgatggtggattcctcctgtagaatccttaccagtgacgtcttccaggactgcaacaagctggtggaccccgagccatatctggatgtctgcatttacgacacctgctcctgtgagtccattggggactgcgcctgcttctgcgacaccattgctgcctatgcccacgtgtgtgcccagcatggcaaggtggtgacctggaggacggccacattgtgcccccagagctgcgaggagaggaatctccgggagaacgggtatgagtgtgagtggcgctataacagctgtgcacctgcctgtcaagtcacgtgtcagcaccctgagccactggcctgccctgtgcagtgtgtggagggctgccatgcccactgccctccagggaaaatcctggatgagcttttgcagacctgcgttgaccctgaagactgtccagtgtgtgaggtggctggccggcgttttgcctcaggaaagaaagtcaccttgaatcccagtgaccctgagcactgccagatttgccactgtgatgttgtcaacctcacctgtgaagcctgccaggagccgggaggcctggtggtgcctcccacagatgccccggtgagccccaccactctgtatgtggaggacatctcggaaccgccgttgcacgatttctgataa

SEQ ID NO: 53 - DNA, 6420 bp, Artificial Sequence
  scFVIII/D'D3-50
gccaccagaagatactacctgggtgcagtggaactgtcatgggactatatgcaaagtgatctcggtgagctgcctgtggacgcaagatttcctcctagagtgccaaaatcttttccattcaacacctcagtcgtgtacaaaaagactctgtttgtagaattcacggatcaccttttcaacatcgctaagccaaggccaccctggatgggtctgctaggtcctaccatccaggctgaggtttatgatacagtggtcattacacttaagaacatggcttcccatcctgtcagtcttcatgctgttggtgtatcctactggaaagcttctgagggagctgaatatgatgatcagaccagtcaaagggagaaagaagatgataaagtcttccctggtggaagccatacatatgtctggcaggtcctgaaagagaatggtccaatggcctctgacccactgtgccttacctactcatatctttctcatgtggacctggtaaaagacttgaattcaggcctcattggagccctactagtatgtagagaagggagtctggccaaggaaaagacacagaccttgcacaaatttatactactttttgctgtatttgatgaagggaaaagttggcactcagaaacaaagaactccttgatgcaggatagggatgctgcatctgctcgggcctggcctaaaatgcacacagtcaatggttatgtaaacaggtctctgccaggtctgattggatgccacaggaaatcagtctattggcatgtgattggaatgggcaccactcctgaagtgcactcaatattcctcgaaggtcacacatttcttgtgaggaaccatcgccaggcgtccttggaaatctcgccaataactttccttactgctcaaacactcttgatggaccttggacagtttctactgttttgtcatatctcttcccaccaacatgatggcatggaagcttatgtcaaagtagacagctgtccagaggaaccccaactacgaatgaaaaataatgaagaagcggaagactatgatgatgatcttactgattctgaaatggatgtggtcaggtttgatgatgacaactctccttcctttatccaaattcgctcagttgccaagaagcatcctaaaacttgggtacattacattgctgctgaagaggaggactgggactatgctcccttagtcctcgcccccgatgacagaagttataaaagtcaatatttgaacaatggccctcagcggattggtaggaagtacaaaaaagtccgatttatggcatacacagatgaaacctttaagactcgtgaagctattcagcatgaatcaggaatcttgggacctttactttatggggaagttggagacacactgttgattatatttaagaatcaagcaagcagaccatataacatctaccctcacggaatcactgatgtccgtcctttgtattcaaggagattaccaaaaggtgtaaaacatttgaaggattttccaattctgccaggagaaatattcaaatataaatggacagtgactgtagaagatgggccaactaaatcagatcctcggtgcctgacccgctattactctagtttcgttaatatggagagagatctagcttcaggactcattggccctctcctcatctgctacaaagaatctgtagatcaaagaggaaaccagataatgtcagacaagaggaatgtcatcctgttttctgtatttgatgagaaccgaagctggtacctcacagagaatatacaacgctttctccccaatccagctggagtgcagcttgaggatccagagttccaagcctccaacatcatgcacagcatcaatggctatgtttttgatagtttgcagttgtcagtttgtttgcatgaggtggcatactggtacattctaagcattggagcacagactgacttcctttctgtcttcttctctggatataccttcaaacacaaaatggtctatgaagacacactcaccctattcccattctcaggagaaactgtcttcatgtcgatggaaaacccaggtctatggattctggggtgccacaactcagactttcggaacagaggcatgaccgccttactgaaggtttctagttgtgacaagaacactggtgattattacgaggacagttatgaagatatttcagcatacttgctgagtaaaaacaatgccattgaaccaagaagcttctcccagaattcaagacaccctagcactaggcaaaagcaatttaatgccaccacaattccagaaaatgacatagagaagactgacccttggtttgcacacagaacacctatgcctaaatgtcaaaatgtctcctctagtgatttgttgatgctcttgcgacagagtcctactccacatgggctatccttatctgatctccaagaagccaaatatgagactttttctgatgatccatcacctggagcaatagacagtaataacagcctgtctgaaatgacacacttcaggccacagctccatcacagtggggacatggtatttacccctgagtcaggcctccaattaagattaaatgagaaactggggacaactgcagcaacagagttgaagaaacttgatttcaaagtttctagtacatcaaataatctgatttcaacaattccatcagacaatttggcagcaggtactgataatacaagtactcttcagtcagatcaagaggaaattgactatgatgataccatatcagttgaaatgaagaaggaagattttgacatttatgatgaggatgaaaatcagagcccccgcagctttcaaaagaaaacacgacactattttattgctgcagtggagaggctctgggattatgggatgagtagctccccacatgttctaagaaacagggctcagagtggcagtgtccctcagttcaagaaagttgttttccaggaatttactgatggctcctttactcagcccttataccgtggagaactaaatgaacatttgggactcctggggccatatataagagcagaagttgaagataatatcatggtaactttcagaaatcaggcctctcgtccctattccttctattctagccttatttcttatgaggaagatcagaggcaaggagcagaacctagaaaaaactttgtcaagcctaatgaaaccaaaacttacttttggaaagtgcaacatcatatggcacccactaaagatgagtttgactgcaaagcctgggcttatttctctgatgttgacctggaaaaagatgtgcactcaggcctgattggaccccttctggtctgccacactaacacactgaaccctgctcatgggagacaagtgacagtacaggaatttgctctgtttttcaccatctttgatgagaccaaaagctggtacttcactgaaaatatggaaagaaactgcagggctccctgcaatatccagatggaagatcccacttttaaagagaattatcgcttccatgcaatcaatggctacataatggatacactacctggcttagtaatggctcaggatcaaaggattcgatggtatctgctcagcatgggcagcaatgaaaacatccattctattcatttcagtggacatgtgttcactgtacgaaaaaaagaggagtataaaatggcactgtacaatctctatccaggtgtttttgagacagtggaaatgttaccatccaaagctggaatttggcgggtggaatgccttattggcgagcatctacatgctgggatgagcacactttttctggtgtacagcaataagtgtcagactcccctgggaatggcttctggacacattagagattttcagattacagcttcaggacaatatggacagtgggccccaaagctggccagacttcattattccggatcaatcaatgcctggagcaccaaggagcccttttcttggatcaaggtggatctgttggcaccaatgattattcacggcatcaagacccagggtgcccgtcagaagttctccagcctctacatctctcagtttatcatcatgtatagtcttgatgggaagaagtggcagacttatcgaggaaattccactggaaccttaatggtcttctttggcaatgtggattcatctgggataaaacacaatatttttaaccctccaattattgctcgatacatccgtttgcacccaactcattatagcattcgcagcactcttcgcatggagttgatgggctgtgatttaaatagttgcagcatgccattgggaatggagagtaaagcaatatcagatgcacagattactgcttcatcctactttaccaatatgtttgccacctggtctccttcaaaagctcgacttcacctccaagggaggagtaatgcctggagacctcaggtgaataatccaaaagagtggctgcaagtggacttccagaagacaatgaaagtcacaggagtaactactcagggagtaaaatctctgcttaccagcatgtatgtgaaggagttcctcatctccagcagtcaagatggccatcagtggactctcttttttcagaatggcaaagtaaaggtttttcagggaaatcaagactccttcacacctgtggtgaactctctagacccaccgttactgactcgctaccttcgaattcacccccagagttgggtgcaccagattgccctgaggatggaggttctgggctgcgaggcacaggacctctacctggttccgcgtggatccgggggtggaggttcaggaggtggaggttcaggaggtggaggttcaggaggtggaggttcaggaggtggaggttcaggaggtggaggttcaggaggtggaggttcaggaggtggaggttcaggaggtggaggtagcctatcctgtcggccccccatggtcaagctggtgtgtcccgctgacaacctgcgggctgaagggctcgagtgtaccaaaacgtgccagaactatgacctggagtgcatgagcatgggctgtgtctctggctgcctctgccccccgggcatggtccggcatgagaacagatgtgtggccctggaaaggtgtccctgcttccatcagggcaaggagtatgcccctggagaaacagtgaagattggctgcaacacttgtgtctgtcgggaccggaagtggaactgcacagaccatgtgtgtgatgccacgtgctccacgatcggcatggcccactacctcaccttcgacgggctcaaatacctgttccccggggagtgccagtacgttctggtgcaggattactgcggcagtaaccctgggacctttcggatcctagtggggaataagggatgcagccacccctcagtgaaatgcaagaaacgggtcaccatcctggtggagggaggagagattgagctgtttgacggggaggtgaatgtgaagaggcccatgaaggatgagactcactttgaggtggtggagtctggccggtacatcattctgctgctgggcaaagccctctccgtggtctgggaccgccacctgagcatctccgtggtcctgaagcagacataccaggagaaagtgtgtggcctgtgtgggaattttgatggcatccagaacaatgacctcaccagcagcaacctccaagtggaggaagaccctgtggactttgggaactcctggaaagtgagctcgcagtgtgctgacaccagaaaagtgcctctggactcatcccctgccacctgccataacaacatcatgaagcagacgatggtggattcctcctgtagaatccttaccagtgacgtcttccaggactgcaacaagctggtggaccccgagccatatctggatgtctgcatttacgacacctgctcctgtgagtccattggggactgcgcctgcttctgcgacaccattgctgcctatgcccacgtgtgtgcccagcatggcaaggtggtgacctggaggacggccacattgtgcccccagagctgcgaggagaggaatctccgggagaacgggtatgagtgtgagtggcgctataacagctgtgcacctgcctgtcaagtcacgtgtcagcaccctgagccactggcctgccctgtgcagtgtgtggagggctgccatgcccactgccctccagggaaaatcctggatgagcttttgcagacctgcgttgaccctgaagactgtccagtgtgtgaggtggctggccggcgttttgcctcaggaaagaaagtcaccttgaatcccagtgaccctgagcactgccagatttgccactgtgatgttgtcaacctcacctgtgaagcctgccaggagccgggaggcctggtggtgcctcccacagatgccccggtgagccccaccactctgtatgtggaggacatctcggaaccgccgttgcacgatttctgataa

SEQ ID NO: 54 - DNA, 6450 bp, Artificial Sequence
  scFVIII/D'D3-60
gccaccagaagatactacctgggtgcagtggaactgtcatgggactatatgcaaagtgatctcggtgagctgcctgtggacgcaagatttcctcctagagtgccaaaatcttttccattcaacacctcagtcgtgtacaaaaagactctgtttgtagaattcacggatcaccttttcaacatcgctaagccaaggccaccctggatgggtctgctaggtcctaccatccaggctgaggtttatgatacagtggtcattacacttaagaacatggcttcccatcctgtcagtcttcatgctgttggtgtatcctactggaaagcttctgagggagctgaatatgatgatcagaccagtcaaagggagaaagaagatgataaagtcttccctggtggaagccatacatatgtctggcaggtcctgaaagagaatggtccaatggcctctgacccactgtgccttacctactcatatctttctcatgtggacctggtaaaagacttgaattcaggcctcattggagccctactagtatgtagagaagggagtctggccaaggaaaagacacagaccttgcacaaatttatactactttttgctgtatttgatgaagggaaaagttggcactcagaaacaaagaactccttgatgcaggatagggatgctgcatctgctcgggcctggcctaaaatgcacacagtcaatggttatgtaaacaggtctctgccaggtctgattggatgccacaggaaatcagtctattggcatgtgattggaatgggcaccactcctgaagtgcactcaatattcctcgaaggtcacacatttcttgtgaggaaccatcgccaggcgtccttggaaatctcgccaataactttccttactgctcaaacactcttgatggaccttggacagtttctactgttttgtcatatctcttcccaccaacatgatggcatggaagcttatgtcaaagtagacagctgtccagaggaaccccaactacgaatgaaaaataatgaagaagcggaagactatgatgatgatcttactgattctgaaatggatgtggtcaggtttgatgatgacaactctccttcctttatccaaattcgctcagttgccaagaagcatcctaaaacttgggtacattacattgctgctgaagaggaggactgggactatgctcccttagtcctcgcccccgatgacagaagttataaaagtcaatatttgaacaatggccctcagcggattggtaggaagtacaaaaaagtccgatttatggcatacacagatgaaacctttaagactcgtgaagctattcagcatgaatcaggaatcttgggacctttactttatggggaagttggagacacactgttgattatatttaagaatcaagcaagcagaccatataacatctaccctcacggaatcactgatgtccgtcctttgtattcaaggagattaccaaaaggtgtaaaacatttgaaggattttccaattctgccaggagaaatattcaaatataaatggacagtgactgtagaagatgggccaactaaatcagatcctcggtgcctgacccgctattactctagtttcgttaatatggagagagatctagcttcaggactcattggccctctcctcatctgctacaaagaatctgtagatcaaagaggaaaccagataatgtcagacaagaggaatgtcatcctgttttctgtatttgatgagaaccgaagctggtacctcacagagaatatacaacgctttctccccaatccagctggagtgcagcttgaggatccagagttccaagcctccaacatcatgcacagcatcaatggctatgtttttgatagtttgcagttgtcagtttgtttgcatgaggtggcatactggtacattctaagcattggagcacagactgacttcctttctgtcttcttctctggatataccttcaaacacaaaatggtctatgaagacacactcaccctattcccattctcaggagaaactgtcttcatgtcgatggaaaacccaggtctatggattctggggtgccacaactcagactttcggaacagaggcatgaccgccttactgaaggtttctagttgtgacaagaacactggtgattattacgaggacagttatgaagatatttcagcatacttgctgagtaaaaacaatgccattgaaccaagaagcttctcccagaattcaagacaccctagcactaggcaaaagcaatttaatgccaccacaattccagaaaatgacatagagaagactgacccttggtttgcacacagaacacctatgcctaaatgtcaaaatgtctcctctagtgatttgttgatgctcttgcgacagagtcctactccacatgggctatccttatctgatctccaagaagccaaatatgagactttttctgatgatccatcacctggagcaatagacagtaataacagcctgtctgaaatgacacacttcaggccacagctccatcacagtggggacatggtatttacccctgagtcaggcctccaattaagattaaatgagaaactggggacaactgcagcaacagagttgaagaaacttgatttcaaagtttctagtacatcaaataatctgatttcaacaattccatcagacaatttggcagcaggtactgataatacaagtactcttcagtcagatcaagaggaaattgactatgatgataccatatcagttgaaatgaagaaggaagattttgacatttatgatgaggatgaaaatcagagcccccgcagctttcaaaagaaaacacgacactattttattgctgcagtggagaggctctgggattatgggatgagtagctccccacatgttctaagaaacagggctcagagtggcagtgtccctcagttcaagaaagttgttttccaggaatttactgatggctcctttactcagcccttataccgtggagaactaaatgaacatttgggactcctggggccatatataagagcagaagttgaagataatatcatggtaactttcagaaatcaggcctctcgtccctattccttctattctagccttatttcttatgaggaagatcagaggcaaggagcagaacctagaaaaaactttgtcaagcctaatgaaaccaaaacttacttttggaaagtgcaacatcatatggcacccactaaagatgagtttgactgcaaagcctgggcttatttctctgatgttgacctggaaaaagatgtgcactcaggcctgattggaccccttctggtctgccacactaacacactgaaccctgctcatgggagacaagtgacagtacaggaatttgctctgtttttcaccatctttgatgagaccaaaagctggtacttcactgaaaatatggaaagaaactgcagggctccctgcaatatccagatggaagatcccacttttaaagagaattatcgcttccatgcaatcaatggctacataatggatacactacctggcttagtaatggctcaggatcaaaggattcgatggtatctgctcagcatgggcagcaatgaaaacatccattctattcatttcagtggacatgtgttcactgtacgaaaaaaagaggagtataaaatggcactgtacaatctctatccaggtgtttttgagacagtggaaatgttaccatccaaagctggaatttggcgggtggaatgccttattggcgagcatctacatgctgggatgagcacactttttctggtgtacagcaataagtgtcagactcccctgggaatggcttctggacacattagagattttcagattacagcttcaggacaatatggacagtgggccccaaagctggccagacttcattattccggatcaatcaatgcctggagcaccaaggagcccttttcttggatcaaggtggatctgttggcaccaatgattattcacggcatcaagacccagggtgcccgtcagaagttctccagcctctacatctctcagtttatcatcatgtatagtcttgatgggaagaagtggcagacttatcgaggaaattccactggaaccttaatggtcttctttggcaatgtggattcatctgggataaaacacaatatttttaaccctccaattattgctcgatacatccgtttgcacccaactcattatagcattcgcagcactcttcgcatggagttgatgggctgtgatttaaatagttgcagcatgccattgggaatggagagtaaagcaatatcagatgcacagattactgcttcatcctactttaccaatatgtttgccacctggtctccttcaaaagctcgacttcacctccaagggaggagtaatgcctggagacctcaggtgaataatccaaaagagtggctgcaagtggacttccagaagacaatgaaagtcacaggagtaactactcagggagtaaaatctctgcttaccagcatgtatgtgaaggagttcctcatctccagcagtcaagatggccatcagtggactctcttttttcagaatggcaaagtaaaggtttttcagggaaatcaagactccttcacacctgtggtgaactctctagacccaccgttactgactcgctaccttcgaattcacccccagagttgggtgcaccagattgccctgaggatggaggttctgggctgcgaggcacaggacctctacctggttccgcgtggatccgggggtggaggttcaggaggtggaggttcaggaggtggaggttcaggaggtggaggttcaggaggtggaggttcaggaggtggaggttcaggaggtggaggttcaggaggtggaggttcaggaggtggaggttcaggaggtggaggttcaggaggtggaggtagcctatcctgtcggccccccatggtcaagctggtgtgtcccgctgacaacctgcgggctgaagggctcgagtgtaccaaaacgtgccagaactatgacctggagtgcatgagcatgggctgtgtctctggctgcctctgccccccgggcatggtccggcatgagaacagatgtgtggccctggaaaggtgtccctgcttccatcagggcaaggagtatgcccctggagaaacagtgaagattggctgcaacacttgtgtctgtcgggaccggaagtggaactgcacagaccatgtgtgtgatgccacgtgctccacgatcggcatggcccactacctcaccttcgacgggctcaaatacctgttccccggggagtgccagtacgttctggtgcaggattactgcggcagtaaccctgggacctttcggatcctagtggggaataagggatgcagccacccctcagtgaaatgcaagaaacgggtcaccatcctggtggagggaggagagattgagctgtttgacggggaggtgaatgtgaagaggcccatgaaggatgagactcactttgaggtggtggagtctggccggtacatcattctgctgctgggcaaagccctctccgtggtctgggaccgccacctgagcatctccgtggtcctgaagcagacataccaggagaaagtgtgtggcctgtgtgggaattttgatggcatccagaacaatgacctcaccagcagcaacctccaagtggaggaagaccctgtggactttgggaactcctggaaagtgagctcgcagtgtgctgacaccagaaaagtgcctctggactcatcccctgccacctgccataacaacatcatgaagcagacgatggtggattcctcctgtagaatccttaccagtgacgtcttccaggactgcaacaagctggtggaccccgagccatatctggatgtctgcatttacgacacctgctcctgtgagtccattggggactgcgcctgcttctgcgacaccattgctgcctatgcccacgtgtgtgcccagcatggcaaggtggtgacctggaggacggccacattgtgcccccagagctgcgaggagaggaatctccgggagaacgggtatgagtgtgagtggcgctataacagctgtgcacctgcctgtcaagtcacgtgtcagcaccctgagccactggcctgccctgtgcagtgtgtggagggctgccatgcccactgccctccagggaaaatcctggatgagcttttgcagacctgcgttgaccctgaagactgtccagtgtgtgaggtggctggccggcgttttgcctcaggaaagaaagtcaccttgaatcccagtgaccctgagcactgccagatttgccactgtgatgttgtcaacctcacctgtgaagcctgccaggagccgggaggcctggtggtgcctcccacagatgccccggtgagccccaccactctgtatgtggaggacatctcggaaccgccgttgcacgatttctgataa

SEQ ID NO: 55 - DNA, 6540 bp, Artificial Sequence
  scFVIII/D'D3-90
gccaccagaagatactacctgggtgcagtggaactgtcatgggactatatgcaaagtgatctcggtgagctgcctgtggacgcaagatttcctcctagagtgccaaaatcttttccattcaacacctcagtcgtgtacaaaaagactctgtttgtagaattcacggatcaccttttcaacatcgctaagccaaggccaccctggatgggtctgctaggtcctaccatccaggctgaggtttatgatacagtggtcattacacttaagaacatggcttcccatcctgtcagtcttcatgctgttggtgtatcctactggaaagcttctgagggagctgaatatgatgatcagaccagtcaaagggagaaagaagatgataaagtcttccctggtggaagccatacatatgtctggcaggtcctgaaagagaatggtccaatggcctctgacccactgtgccttacctactcatatctttctcatgtggacctggtaaaagacttgaattcaggcctcattggagccctactagtatgtagagaagggagtctggccaaggaaaagacacagaccttgcacaaatttatactactttttgctgtatttgatgaagggaaaagttggcactcagaaacaaagaactccttgatgcaggatagggatgctgcatctgctcgggcctggcctaaaatgcacacagtcaatggttatgtaaacaggtctctgccaggtctgattggatgccacaggaaatcagtctattggcatgtgattggaatgggcaccactcctgaagtgcactcaatattcctcgaaggtcacacatttcttgtgaggaaccatcgccaggcgtccttggaaatctcgccaataactttccttactgctcaaacactcttgatggaccttggacagtttctactgttttgtcatatctcttcccaccaacatgatggcatggaagcttatgtcaaagtagacagctgtccagaggaaccccaactacgaatgaaaaataatgaagaagcggaagactatgatgatgatcttactgattctgaaatggatgtggtcaggtttgatgatgacaactctccttcctttatccaaattcgctcagttgccaagaagcatcctaaaacttgggtacattacattgctgctgaagaggaggactgggactatgctcccttagtcctcgcccccgatgacagaagttataaaagtcaatatttgaacaatggccctcagcggattggtaggaagtacaaaaaagtccgatttatggcatacacagatgaaacctttaagactcgtgaagctattcagcatgaatcaggaatcttgggacctttactttatggggaagttggagacacactgttgattatatttaagaatcaagcaagcagaccatataacatctaccctcacggaatcactgatgtccgtcctttgtattcaaggagattaccaaaaggtgtaaaacatttgaaggattttccaattctgccaggagaaatattcaaatataaatggacagtgactgtagaagatgggccaactaaatcagatcctcggtgcctgacccgctattactctagtttcgttaatatggagagagatctagcttcaggactcattggccctctcctcatctgctacaaagaatctgtagatcaaagaggaaaccagataatgtcagacaagaggaatgtcatcctgttttctgtatttgatgagaaccgaagctggtacctcacagagaatatacaacgctttctccccaatccagctggagtgcagcttgaggatccagagttccaagcctccaacatcatgcacagcatcaatggctatgtttttgatagtttgcagttgtcagtttgtttgcatgaggtggcatactggtacattctaagcattggagcacagactgacttcctttctgtcttcttctctggatataccttcaaacacaaaatggtctatgaagacacactcaccctattcccattctcaggagaaactgtcttcatgtcgatggaaaacccaggtctatggattctggggtgccacaactcagactttcggaacagaggcatgaccgccttactgaaggtttctagttgtgacaagaacactggtgattattacgaggacagttatgaagatatttcagcatacttgctgagtaaaaacaatgccattgaaccaagaagcttctcccagaattcaagacaccctagcactaggcaaaagcaatttaatgccaccacaattccagaaaatgacatagagaagactgacccttggtttgcacacagaacacctatgcctaaatgtcaaaatgtctcctctagtgatttgttgatgctcttgcgacagagtcctactccacatgggctatccttatctgatctccaagaagccaaatatgagactttttctgatgatccatcacctggagcaatagacagtaataacagcctgtctgaaatgacacacttcaggccacagctccatcacagtggggacatggtatttacccctgagtcaggcctccaattaagattaaatgagaaactggggacaactgcagcaacagagttgaagaaacttgatttcaaagtttctagtacatcaaataatctgatttcaacaattccatcagacaatttggcagcaggtactgataatacaagtactcttcagtcagatcaagaggaaattgactatgatgataccatatcagttgaaatgaagaaggaagattttgacatttatgatgaggatgaaaatcagagcccccgcagctttcaaaagaaaacacgacactattttattgctgcagtggagaggctctgggattatgggatgagtagctccccacatgttctaagaaacagggctcagagtggcagtgtccctcagttcaagaaagttgttttccaggaatttactgatggctcctttactcagcccttataccgtggagaactaaatgaacatttgggactcctggggccatatataagagcagaagttgaagataatatcatggtaactttcagaaatcaggcctctcgtccctattccttctattctagccttatttcttatgaggaagatcagaggcaaggagcagaacctagaaaaaactttgtcaagcctaatgaaaccaaaacttacttttggaaagtgcaacatcatatggcacccactaaagatgagtttgactgcaaagcctgggcttatttctctgatgttgacctggaaaaagatgtgcactcaggcctgattggaccccttctggtctgccacactaacacactgaaccctgctcatgggagacaagtgacagtacaggaatttgctctgtttttcaccatctttgatgagaccaaaagctggtacttcactgaaaatatggaaagaaactgcagggctccctgcaatatccagatggaagatcccacttttaaagagaattatcgcttccatgcaatcaatggctacataatggatacactacctggcttagtaatggctcaggatcaaaggattcgatggtatctgctcagcatgggcagcaatgaaaacatccattctattcatttcagtggacatgtgttcactgtacgaaaaaaagaggagtataaaatggcactgtacaatctctatccaggtgtttttgagacagtggaaatgttaccatccaaagctggaatttggcgggtggaatgccttattggcgagcatctacatgctgggatgagcacactttttctggtgtacagcaataagtgtcagactcccctgggaatggcttctggacacattagagattttcagattacagcttcaggacaatatggacagtgggccccaaagctggccagacttcattattccggatcaatcaatgcctggagcaccaaggagcccttttcttggatcaaggtggatctgttggcaccaatgattattcacggcatcaagacccagggtgcccgtcagaagttctccagcctctacatctctcagtttatcatcatgtatagtcttgatgggaagaagtggcagacttatcgaggaaattccactggaaccttaatggtcttctttggcaatgtggattcatctgggataaaacacaatatttttaaccctccaattattgctcgatacatccgtttgcacccaactcattatagcattcgcagcactcttcgcatggagttgatgggctgtgatttaaatagttgcagcatgccattgggaatggagagtaaagcaatatcagatgcacagattactgcttcatcctactttaccaatatgtttgccacctggtctccttcaaaagctcgacttcacctccaagggaggagtaatgcctggagacctcaggtgaataatccaaaagagtggctgcaagtggacttccagaagacaatgaaagtcacaggagtaactactcagggagtaaaatctctgcttaccagcatgtatgtgaaggagttcctcatctccagcagtcaagatggccatcagtggactctcttttttcagaatggcaaagtaaaggtttttcagggaaatcaagactccttcacacctgtggtgaactctctagacccaccgttactgactcgctaccttcgaattcacccccagagttgggtgcaccagattgccctgaggatggaggttctgggctgcgaggcacaggacctctacctggttccgcgtggatccgggggtggaggttcaggaggtggaggttcaggaggtggaggttcaggaggtggaggttcaggaggtggaggttcaggaggtggaggttcaggaggtggaggttcaggaggtggaggttcaggaggtggaggttcaggaggtggaggttcaggaggtggaggttcaggaggtggaggttcaggaggtggaggttcaggaggtggaggttcaggaggtggaggttcaggaggtggaggttcaggaggtggaggtagcctatcctgtcggccccccatggtcaagctggtgtgtcccgctgacaacctgcgggctgaagggctcgagtgtaccaaaacgtgccagaactatgacctggagtgcatgagcatgggctgtgtctctggctgcctctgccccccgggcatggtccggcatgagaacagatgtgtggccctggaaaggtgtccctgcttccatcagggcaaggagtatgcccctggagaaacagtgaagattggctgcaacacttgtgtctgtcgggaccggaagtggaactgcacagaccatgtgtgtgatgccacgtgctccacgatcggcatggcccactacctcaccttcgacgggctcaaatacctgttccccggggagtgccagtacgttctggtgcaggattactgcggcagtaaccctgggacctttcggatcctagtggggaataagggatgcagccacccctcagtgaaatgcaagaaacgggtcaccatcctggtggagggaggagagattgagctgtttgacggggaggtgaatgtgaagaggcccatgaaggatgagactcactttgaggtggtggagtctggccggtacatcattctgctgctgggcaaagccctctccgtggtctgggaccgccacctgagcatctccgtggtcctgaagcagacataccaggagaaagtgtgtggcctgtgtgggaattttgatggcatccagaacaatgacctcaccagcagcaacctccaagtggaggaagaccctgtggactttgggaactcctggaaagtgagctcgcagtgtgctgacaccagaaaagtgcctctggactcatcccctgccacctgccataacaacatcatgaagcagacgatggtggattcctcctgtagaatccttaccagtgacgtcttccaggactgcaacaagctggtggaccccgagccatatctggatgtctgcatttacgacacctgctcctgtgagtccattggggactgcgcctgcttctgcgacaccattgctgcctatgcccacgtgtgtgcccagcatggcaaggtggtgacctggaggacggccacattgtgcccccagagctgcgaggagaggaatctccgggagaacgggtatgagtgtgagtggcgctataacagctgtgcacctgcctgtcaagtcacgtgtcagcaccctgagccactggcctgccctgtgcagtgtgtggagggctgccatgcccactgccctccagggaaaatcctggatgagcttttgcagacctgcgttgaccctgaagactgtccagtgtgtgaggtggctggccggcgttttgcctcaggaaagaaagtcaccttgaatcccagtgaccctgagcactgccagatttgccactgtgatgttgtcaacctcacctgtgaagcctgccaggagccgggaggcctggtggtgcctcccacagatgccccggtgagccccaccactctgtatgtggaggacatctcggaaccgccgttgcacgatttctgataa

SEQ ID NO: 56 - DNA, 6630 bp, Artificial Sequence
  scFVIII/D'D3-120
gccaccagaagatactacctgggtgcagtggaactgtcatgggactatatgcaaagtgatctcggtgagctgcctgtggacgcaagatttcctcctagagtgccaaaatcttttccattcaacacctcagtcgtgtacaaaaagactctgtttgtagaattcacggatcaccttttcaacatcgctaagccaaggccaccctggatgggtctgctaggtcctaccatccaggctgaggtttatgatacagtggtcattacacttaagaacatggcttcccatcctgtcagtcttcatgctgttggtgtatcctactggaaagcttctgagggagctgaatatgatgatcagaccagtcaaagggagaaagaagatgataaagtcttccctggtggaagccatacatatgtctggcaggtcctgaaagagaatggtccaatggcctctgacccactgtgccttacctactcatatctttctcatgtggacctggtaaaagacttgaattcaggcctcattggagccctactagtatgtagagaagggagtctggccaaggaaaagacacagaccttgcacaaatttatactactttttgctgtatttgatgaagggaaaagttggcactcagaaacaaagaactccttgatgcaggatagggatgctgcatctgctcgggcctggcctaaaatgcacacagtcaatggttatgtaaacaggtctctgccaggtctgattggatgccacaggaaatcagtctattggcatgtgattggaatgggcaccactcctgaagtgcactcaatattcctcgaaggtcacacatttcttgtgaggaaccatcgccaggcgtccttggaaatctcgccaataactttccttactgctcaaacactcttgatggaccttggacagtttctactgttttgtcatatctcttcccaccaacatgatggcatggaagcttatgtcaaagtagacagctgtccagaggaaccccaactacgaatgaaaaataatgaagaagcggaagactatgatgatgatcttactgattctgaaatggatgtggtcaggtttgatgatgacaactctccttcctttatccaaattcgctcagttgccaagaagcatcctaaaacttgggtacattacattgctgctgaagaggaggactgggactatgctcccttagtcctcgcccccgatgacagaagttataaaagtcaatatttgaacaatggccctcagcggattggtaggaagtacaaaaaagtccgatttatggcatacacagatgaaacctttaagactcgtgaagctattcagcatgaatcaggaatcttgggacctttactttatggggaagttggagacacactgttgattatatttaagaatcaagcaagcagaccatataacatctaccctcacggaatcactgatgtccgtcctttgtattcaaggagattaccaaaaggtgtaaaacatttgaaggattttccaattctgccaggagaaatattcaaatataaatggacagtgactgtagaagatgggccaactaaatcagatcctcggtgcctgacccgctattactctagtttcgttaatatggagagagatctagcttcaggactcattggccctctcctcatctgctacaaagaatctgtagatcaaagaggaaaccagataatgtcagacaagaggaatgtcatcctgttttctgtatttgatgagaaccgaagctggtacctcacagagaatatacaacgctttctccccaatccagctggagtgcagcttgaggatccagagttccaagcctccaacatcatgcacagcatcaatggctatgtttttgatagtttgcagttgtcagtttgtttgcatgaggtggcatactggtacattctaagcattggagcacagactgacttcctttctgtcttcttctctggatataccttcaaacacaaaatggtctatgaagacacactcaccctattcccattctcaggagaaactgtcttcatgtcgatggaaaacccaggtctatggattctggggtgccacaactcagactttcggaacagaggcatgaccgccttactgaaggtttctagttgtgacaagaacactggtgattattacgaggacagttatgaagatatttcagcatacttgctgagtaaaaacaatgccattgaaccaagaagcttctcccagaattcaagacaccctagcactaggcaaaagcaatttaatgccaccacaattccagaaaatgacatagagaagactgacccttggtttgcacacagaacacctatgcctaaatgtcaaaatgtctcctctagtgatttgttgatgctcttgcgacagagtcctactccacatgggctatccttatctgatctccaagaagccaaatatgagactttttctgatgatccatcacctggagcaatagacagtaataacagcctgtctgaaatgacacacttcaggccacagctccatcacagtggggacatggtatttacccctgagtcaggcctccaattaagattaaatgagaaactggggacaactgcagcaacagagttgaagaaacttgatttcaaagtttctagtacatcaaataatctgatttcaacaattccatcagacaatttggcagcaggtactgataatacaagtactcttcagtcagatcaagaggaaattgactatgatgataccatatcagttgaaatgaagaaggaagattttgacatttatgatgaggatgaaaatcagagcccccgcagctttcaaaagaaaacacgacactattttattgctgcagtggagaggctctgggattatgggatgagtagctccccacatgttctaagaaacagggctcagagtggcagtgtccctcagttcaagaaagttgttttccaggaatttactgatggctcctttactcagcccttataccgtggagaactaaatgaacatttgggactcctggggccatatataagagcagaagttgaagataatatcatggtaactttcagaaatcaggcctctcgtccctattccttctattctagccttatttcttatgaggaagatcagaggcaaggagcagaacctagaaaaaactttgtcaagcctaatgaaaccaaaacttacttttggaaagtgcaacatcatatggcacccactaaagatgagtttgactgcaaagcctgggcttatttctctgatgttgacctggaaaaagatgtgcactcaggcctgattggaccccttctggtctgccacactaacacactgaaccctgctcatgggagacaagtgacagtacaggaatttgctctgtttttcaccatctttgatgagaccaaaagctggtacttcactgaaaatatggaaagaaactgcagggctccctgcaatatccagatggaagatcccacttttaaagagaattatcgcttccatgcaatcaatggctacataatggatacactacctggcttagtaatggctcaggatcaaaggattcgatggtatctgctcagcatgggcagcaatgaaaacatccattctattcatttcagtggacatgtgttcactgtacgaaaaaaagaggagtataaaatggcactgtacaatctctatccaggtgtttttgagacagtggaaatgttaccatccaaagctggaatttggcgggtggaatgccttattggcgagcatctacatgctgggatgagcacactttttctggtgtacagcaataagtgtcagactcccctgggaatggcttctggacacattagagattttcagattacagcttcaggacaatatggacagtgggccccaaagctggccagacttcattattccggatcaatcaatgcctggagcaccaaggagcccttttcttggatcaaggtggatctgttggcaccaatgattattcacggcatcaagacccagggtgcccgtcagaagttctccagcctctacatctctcagtttatcatcatgtatagtcttgatgggaagaagtggcagacttatcgaggaaattccactggaaccttaatggtcttctttggcaatgtggattcatctgggataaaacacaatatttttaaccctccaattattgctcgatacatccgtttgcacccaactcattatagcattcgcagcactcttcgcatggagttgatgggctgtgatttaaatagttgcagcatgccattgggaatggagagtaaagcaatatcagatgcacagattactgcttcatcctactttaccaatatgtttgccacctggtctccttcaaaagctcgacttcacctccaagggaggagtaatgcctggagacctcaggtgaataatccaaaagagtggctgcaagtggacttccagaagacaatgaaagtcacaggagtaactactcagggagtaaaatctctgcttaccagcatgtatgtgaaggagttcctcatctccagcagtcaagatggccatcagtggactctcttttttcagaatggcaaagtaaaggtttttcagggaaatcaagactccttcacacctgtggtgaactctctagacccaccgttactgactcgctaccttcgaattcacccccagagttgggtgcaccagattgccctgaggatggaggttctgggctgcgaggcacaggacctctacctggttccgcgtggatccgggggtggaggttcaggaggtggaggttcaggaggtggaggttcaggaggtggaggttcaggaggtggaggttcaggaggtggaggttcaggaggtggaggttcaggaggtggaggttcaggaggtggaggttcaggaggtggaggttcaggaggtggaggttcaggaggtggaggttcaggaggtggaggttcaggaggtggaggttcaggaggtggaggttcaggaggtggaggttcaggaggtggaggttcaggaggtggaggttcaggaggtggaggttcaggaggtggaggttcaggaggtggaggttcaggaggtggaggttcaggaggtggaggtagcctatcctgtcggccccccatggtcaagctggtgtgtcccgctgacaacctgcgggctgaagggctcgagtgtaccaaaacgtgccagaactatgacctggagtgcatgagcatgggctgtgtctctggctgcctctgccccccgggcatggtccggcatgagaacagatgtgtggccctggaaaggtgtccctgcttccatcagggcaaggagtatgcccctggagaaacagtgaagattggctgcaacacttgtgtctgtcgggaccggaagtggaactgcacagaccatgtgtgtgatgccacgtgctccacgatcggcatggcccactacctcaccttcgacgggctcaaatacctgttccccggggagtgccagtacgttctggtgcaggattactgcggcagtaaccctgggacctttcggatcctagtggggaataagggatgcagccacccctcagtgaaatgcaagaaacgggtcaccatcctggtggagggaggagagattgagctgtttgacggggaggtgaatgtgaagaggcccatgaaggatgagactcactttgaggtggtggagtctggccggtacatcattctgctgctgggcaaagccctctccgtggtctgggaccgccacctgagcatctccgtggtcctgaagcagacataccaggagaaagtgtgtggcctgtgtgggaattttgatggcatccagaacaatgacctcaccagcagcaacctccaagtggaggaagaccctgtggactttgggaactcctggaaagtgagctcgcagtgtgctgacaccagaaaagtgcctctggactcatcccctgccacctgccataacaacatcatgaagcagacgatggtggattcctcctgtagaatccttaccagtgacgtcttccaggactgcaacaagctggtggaccccgagccatatctggatgtctgcatttacgacacctgctcctgtgagtccattggggactgcgcctgcttctgcgacaccattgctgcctatgcccacgtgtgtgcccagcatggcaaggtggtgacctggaggacggccacattgtgcccccagagctgcgaggagaggaatctccgggagaacgggtatgagtgtgagtggcgctataacagctgtgcacctgcctgtcaagtcacgtgtcagcaccctgagccactggcctgccctgtgcagtgtgtggagggctgccatgcccactgccctccagggaaaatcctggatgagcttttgcagacctgcgttgaccctgaagactgtccagtgtgtgaggtggctggccggcgttttgcctcaggaaagaaagtcaccttgaatcccagtgaccctgagcactgccagatttgccactgtgatgttgtcaacctcacctgtgaagcctgccaggagccgggaggcctggtggtgcctcccacagatgccccggtgagccccaccactctgtatgtggaggacatctcggaaccgccgttgcacgatttctgataa

SEQ ID NO: 57 - DNA, 6630 bp, Artificial Sequence
  scFVIII/D'D3-120-TH1
gccaccagaagatactacctgggtgcagtggaactgtcatgggactatatgcaaagtgatctcggtgagctgcctgtggacgcaagatttcctcctagagtgccaaaatcttttccattcaacacctcagtcgtgtacaaaaagactctgtttgtagaattcacggatcaccttttcaacatcgctaagccaaggccaccctggatgggtctgctaggtcctaccatccaggctgaggtttatgatacagtggtcattacacttaagaacatggcttcccatcctgtcagtcttcatgctgttggtgtatcctactggaaagcttctgagggagctgaatatgatgatcagaccagtcaaagggagaaagaagatgataaagtcttccctggtggaagccatacatatgtctggcaggtcctgaaagagaatggtccaatggcctctgacccactgtgccttacctactcatatctttctcatgtggacctggtaaaagacttgaattcaggcctcattggagccctactagtatgtagagaagggagtctggccaaggaaaagacacagaccttgcacaaatttatactactttttgctgtatttgatgaagggaaaagttggcactcagaaacaaagaactccttgatgcaggatagggatgctgcatctgctcgggcctggcctaaaatgcacacagtcaatggttatgtaaacaggtctctgccaggtctgattggatgccacaggaaatcagtctattggcatgtgattggaatgggcaccactcctgaagtgcactcaatattcctcgaaggtcacacatttcttgtgaggaaccatcgccaggcgtccttggaaatctcgccaataactttccttactgctcaaacactcttgatggaccttggacagtttctactgttttgtcatatctcttcccaccaacatgatggcatggaagcttatgtcaaagtagacagctgtccagaggaaccccaactacgaatgaaaaataatgaagaagcggaagactatgatgatgatcttactgattctgaaatggatgtggtcaggtttgatgatgacaactctccttcctttatccaaattcgctcagttgccaagaagcatcctaaaacttgggtacattacattgctgctgaagaggaggactgggactatgctcccttagtcctcgcccccgatgacagaagttataaaagtcaatatttgaacaatggccctcagcggattggtaggaagtacaaaaaagtccgatttatggcatacacagatgaaacctttaagactcgtgaagctattcagcatgaatcaggaatcttgggacctttactttatggggaagttggagacacactgttgattatatttaagaatcaagcaagcagaccatataacatctaccctcacggaatcactgatgtccgtcctttgtattcaaggagattaccaaaaggtgtaaaacatttgaaggattttccaattctgccaggagaaatattcaaatataaatggacagtgactgtagaagatgggccaactaaatcagatcctcggtgcctgacccgctattactctagtttcgttaatatggagagagatctagcttcaggactcattggccctctcctcatctgctacaaagaatctgtagatcaaagaggaaaccagataatgtcagacaagaggaatgtcatcctgttttctgtatttgatgagaaccgaagctggtacctcacagagaatatacaacgctttctccccaatccagctggagtgcagcttgaggatccagagttccaagcctccaacatcatgcacagcatcaatggctatgtttttgatagtttgcagttgtcagtttgtttgcatgaggtggcatactggtacattctaagcattggagcacagactgacttcctttctgtcttcttctctggatataccttcaaacacaaaatggtctatgaagacacactcaccctattcccattctcaggagaaactgtcttcatgtcgatggaaaacccaggtctatggattctggggtgccacaactcagactttcggaacagaggcatgaccgccttactgaaggtttctagttgtgacaagaacactggtgattattacgaggacagttatgaagatatttcagcatacttgctgagtaaaaacaatgccattgaaccaagaagcttctcccagaattcaagacaccctagcactaggcaaaagcaatttaatgccaccacaattccagaaaatgacatagagaagactgacccttggtttgcacacagaacacctatgcctaaatgtcaaaatgtctcctctagtgatttgttgatgctcttgcgacagagtcctactccacatgggctatccttatctgatctccaagaagccaaatatgagactttttctgatgatccatcacctggagcaatagacagtaataacagcctgtctgaaatgacacacttcaggccacagctccatcacagtggggacatggtatttacccctgagtcaggcctccaattaagattaaatgagaaactggggacaactgcagcaacagagttgaagaaacttgatttcaaagtttctagtacatcaaataatctgatttcaacaattccatcagacaatttggcagcaggtactgataatacaagtactcttcagtcagatcaagaggaaattgactatgatgataccatatcagttgaaatgaagaaggaagattttgacatttatgatgaggatgaaaatcagagcccccgcagctttcaaaagaaaacacgacactattttattgctgcagtggagaggctctgggattatgggatgagtagctccccacatgttctaagaaacagggctcagagtggcagtgtccctcagttcaagaaagttgttttccaggaatttactgatggctcctttactcagcccttataccgtggagaactaaatgaacatttgggactcctggggccatatataagagcagaagttgaagataatatcatggtaactttcagaaatcaggcctctcgtccctattccttctattctagccttatttcttatgaggaagatcagaggcaaggagcagaacctagaaaaaactttgtcaagcctaatgaaaccaaaacttacttttggaaagtgcaacatcatatggcacccactaaagatgagtttgactgcaaagcctgggcttatttctctgatgttgacctggaaaaagatgtgcactcaggcctgattggaccccttctggtctgccacactaacacactgaaccctgctcatgggagacaagtgacagtacaggaatttgctctgtttttcaccatctttgatgagaccaaaagctggtacttcactgaaaatatggaaagaaactgcagggctccctgcaatatccagatggaagatcccacttttaaagagaattatcgcttccatgcaatcaatggctacataatggatacactacctggcttagtaatggctcaggatcaaaggattcgatggtatctgctcagcatgggcagcaatgaaaacatccattctattcatttcagtggacatgtgttcactgtacgaaaaaaagaggagtataaaatggcactgtacaatctctatccaggtgtttttgagacagtggaaatgttaccatccaaagctggaatttggcgggtggaatgccttattggcgagcatctacatgctgggatgagcacactttttctggtgtacagcaataagtgtcagactcccctgggaatggcttctggacacattagagattttcagattacagcttcaggacaatatggacagtgggccccaaagctggccagacttcattattccggatcaatcaatgcctggagcaccaaggagcccttttcttggatcaaggtggatctgttggcaccaatgattattcacggcatcaagacccagggtgcccgtcagaagttctccagcctctacatctctcagtttatcatcatgtatagtcttgatgggaagaagtggcagacttatcgaggaaattccactggaaccttaatggtcttctttggcaatgtggattcatctgggataaaacacaatatttttaaccctccaattattgctcgatacatccgtttgcacccaactcattatagcattcgcagcactcttcgcatggagttgatgggctgtgatttaaatagttgcagcatgccattgggaatggagagtaaagcaatatcagatgcacagattactgcttcatcctactttaccaatatgtttgccacctggtctccttcaaaagctcgacttcacctccaagggaggagtaatgcctggagacctcaggtgaataatccaaaagagtggctgcaagtggacttccagaagacaatgaaagtcacaggagtaactactcagggagtaaaatctctgcttaccagcatgtatgtgaaggagttcctcatctccagcagtcaagatggccatcagtggactctcttttttcagaatggcaaagtaaaggtttttcagggaaatcaagactccttcacacctgtggtgaactctctagacccaccgttactgactcgctaccttcgaattcacccccagagttgggtgcaccagattgccctgaggatggaggttctgggctgcgaggcacaggacctctacggtggaggttcactggttccgcgtggatccgggggtggaggttcaggaggtggaggttcaggaggtggaggttcaggaggtggaggttcaggaggtggaggttcaggaggtggaggttcaggaggtggaggttcaggaggtggaggttcaggaggtggaggttcaggaggtggaggttcaggaggtggaggttcaggaggtggaggttcaggaggtggaggttcaggaggtggaggttcaggaggtggaggttcaggaggtggaggttcaggaggtggaggttcaggaggtggaggttcaggaggtggaggttcaggaggtggaggttcaggaggtggaggttcaggaggtggaggtggtagcctatcctgtcggccccccatggtcaagctggtgtgtcccgctgacaacctgcgggctgaagggctcgagtgtaccaaaacgtgccagaactatgacctggagtgcatgagcatgggctgtgtctctggctgcctctgccccccgggcatggtccggcatgagaacagatgtgtggccctggaaaggtgtccctgcttccatcagggcaaggagtatgcccctggagaaacagtgaagattggctgcaacacttgtgtctgtcgggaccggaagtggaactgcacagaccatgtgtgtgatgccacgtgctccacgatcggcatggcccactacctcaccttcgacgggctcaaatacctgttccccggggagtgccagtacgttctggtgcaggattactgcggcagtaaccctgggacctttcggatcctagtggggaataagggatgcagccacccctcagtgaaatgcaagaaacgggtcaccatcctggtggagggaggagagattgagctgtttgacggggaggtgaatgtgaagaggcccatgaaggatgagactcactttgaggtggtggagtctggccggtacatcattctgctgctgggcaaagccctctccgtggtctgggaccgccacctgagcatctccgtggtcctgaagcagacataccaggagaaagtgtgtggcctgtgtgggaattttgatggcatccagaacaatgacctcaccagcagcaacctccaagtggaggaagaccctgtggactttgggaactcctggaaagtgagctcgcagtgtgctgacaccagaaaagtgcctctggactcatcccctgccacctgccataacaacatcatgaagcagacgatggtggattcctcctgtagaatccttaccagtgacgtcttccaggactgcaacaagctggtggaccccgagccatatctggatgtctgcatttacgacacctgctcctgtgagtccattggggactgcgcctgcttctgcgacaccattgctgcctatgcccacgtgtgtgcccagcatggcaaggtggtgacctggaggacggccacattgtgcccccagagctgcgaggagaggaatctccgggagaacgggtatgagtgtgagtggcgctataacagctgtgcacctgcctgtcaagtcacgtgtcagcaccctgagccactggcctgccctgtgcagtgtgtggagggctgccatgcccactgccctccagggaaaatcctggatgagcttttgcagacctgcgttgaccctgaagactgtccagtgtgtgaggtggctggccggcgttttgcctcaggaaagaaagtcaccttgaatcccagtgaccctgagcactgccagatttgccactgtgatgttgtcaacctcacctgtgaagcctgccaggagccgggaggcctggtggtgcctcccacagatgccccggtgagccccaccactctgtatgtggaggacatctcggaaccgccgttgcacgatttctgataa

SEQ ID NO: 58 - DNA, 6630 bp, Artificial Sequence
  scFVIII/D'D3-120-TH1
gccactagaaggtactacctgggggctgtggagctgtcctgggattacatgcagtccgacctgggagagctgcccgttgatgctagattcccacctagggtgcccaaatctttcccctttaatacatctgtggtgtacaaaaagacactgtttgtggagtttaccgatcacctcttcaatattgccaagcctcgaccaccctggatgggtctccttggccctacaattcaggccgaggtctacgacaccgtggtaatcaccctgaagaacatggcatcacaccccgtgagcctgcacgctgtgggcgtgtcttactggaaggccagtgaaggcgccgaatatgatgaccagacaagccagagagaaaaggaggacgataaggtgttccctggcggatctcacacatatgtgtggcaggtgctgaaggagaatggacccatggcatctgaccccctttgcctaacttatagttatctttcccatgtggaccttgtcaaggacctgaattctgggcttatcggagcactgctcgtgtgtagagagggttcattggctaaggagaagactcagacactgcacaagttcatcctgctgttcgctgtcttcgatgaggggaagtcttggcacagcgaaaccaagaattccctgatgcaagatcgcgatgccgcatccgctcgcgcatggcctaagatgcatacagtgaatgggtacgtcaatagatccttgcctggcctgattggctgtcacagaaaatctgtgtactggcacgtgattggtatggggaccaccccagaagtgcatagtatctttttggaagggcatacctttctggtgcggaaccacagacaggcctccctggaaattagtccaatcacattcctgacagcccagacactgctgatggatctggggcagtttctcctgttctgtcatatctctagccaccagcatgacgggatggaggcctatgtgaaggtggatagttgtccagaagagcctcagttgagaatgaagaacaacgaggaggctgaagactatgatgatgatttgaccgactctgaaatggatgttgtcagatttgacgacgataatagcccaagctttatccagatcagatcagtggcaaagaagcaccctaagacctgggtgcattatatcgctgccgaagaggaggactgggactacgcccctcttgtgctggcccctgacgataggagctataagtcacagtacctcaacaacggacctcagcgaattggccggaagtataaaaaggttcggtttatggcttacaccgatgaaaccttcaagactagggaggccattcaacacgagtccggtattctcggccccctcctgtatggcgaagtgggggacacactgctgatcatctttaagaaccaggcttcccgcccctacaacatctaccctcacggtattaccgatgtgcggccactgtattctaggagactccctaaaggagtgaagcacctcaaagatttccctattctgcctggtgagatctttaaatacaaatggaccgtcaccgtggaggatgggcccacaaaatccgaccccaggtgtctgaccaggtattatagtagctttgttaatatggagagggatctcgccagcggactgatcggacccctgctgatttgctacaaggaatctgttgatcagagaggtaaccagatcatgagtgataagagaaacgtgatactgttttcagtgttcgatgaaaacagatcatggtacttgactgaaaatattcagcggtttctgccaaaccccgctggagttcagcttgaggaccctgaatttcaagctagtaacatcatgcacagcattaatggatatgtttttgattcattgcagctgtctgtttgcctgcacgaggtggcctattggtatattcttagcattggtgctcagactgacttcctgtccgtgttctttagcgggtacaccttcaagcacaagatggtctatgaggacacattgactctctttccattctccggtgagactgtctttatgtctatggagaacccagggttgtggattctgggctgccataactctgattttagaaacagaggcatgacagctctgctaaaggtgagttcttgcgataagaacacaggagactattatgaggacagttacgaagacatctcagcgtaccttctaagtaagaataatgccattgaaccaagaagtttctctcagaattcccgccatccctccacaaggcagaaacagttcaacgccacaactatccctgagaatgatattgaaaagacagacccttggttcgctcacagaactccaatgcctaaatgccagaatgtctcctcaagcgacctgctgatgctgctgagacagagccccacccctcacgggttgtccctctctgacctgcaggaagcaaagtatgagacttttagcgatgatccctccccaggagcaattgactctaacaattccctgagtgagatgacccacttcagaccacagttgcaccatagcggcgacatggttttcacacctgaaagcggcctgcagcttcgtctgaatgagaagctcggcacaacagctgcaactgaacttaagaaactcgattttaaagtgagctccaccagtaataatctgatctccaccatccctagcgataacttggccgccgggacagataatacttctactctgcagagtgaccaggaggaaatcgactatgacgatactattagcgtggagatgaagaaggaagattttgatatctatgacgaagatgagaatcagagccccaggtcttttcagaaaaagaccagacactatttcatcgcagctgtcgagcggttgtgggactacggcatgtctagttctccccatgtgctcaggaacagggcccagtctggcagcgtccctcagttcaagaaggtcgtgttccaggaattcactgacggctcttttacacagccactgtatcgtggagagctcaatgaacatctgggtctgctgggtccctacattcgcgcagaagtggaggataacatcatggtgactttcagaaatcaggcaagtagaccttacagcttctactcaagcttaattagttacgaggaggaccagagacaaggcgctgagcctaggaagaactttgttaaacctaatgagacaaagacctacttctggaaggtgcagcatcatatggctcctacaaaggatgagttcgactgtaaagcatgggcttacttttcagatgtggatctggaaaaggacgttcattcgggtctgatcggacctctactggtgtgccacaccaacaccctaaacccagctcatggacgacaggtgacagtgcaggaattcgctctgttctttaccatcttcgatgagactaagtcatggtacttcactgaaaatatggagcgtaattgtcgagctccatgtaacattcagatggaggatcctactttcaaagagaattacagatttcatgccattaatggctatattatggatactctgccaggcctggtcatggcccaggatcagaggattcgatggtacctgctcagtatgggtagcaatgaaaacattcattcaatccatttttctggtcatgtgttcactgtgagaaagaaagaggagtataaaatggctctgtataatctgtatcctggagtgtttgagacagttgaaatgctgccctcaaaagcaggtatctggagagtggaatgcttgatcggtgagcatctgcatgccggtatgagcaccctgttcttggtctactccaataagtgtcagacgcctctggggatggccagcgggcacatccgagatttccagatcaccgccagcggacagtacggacagtgggcaccaaagctggccaggctccactatagcggctctatcaacgcgtggtccactaaagaaccctttagctggatcaaagtcgatctgttggccccaatgatcatccatgggattaagactcagggtgctaggcagaaattcagcagcctgtacatatcccagttcatcattatgtatagcttggacggaaagaaatggcagacatatagagggaactctaccggcaccttaatggtgttcttcggaaacgtcgacagcagcggcattaagcataatatctttaatcccccaatcattgctcgttatattaggctccaccctacccattattctatccggagtaccctgcgaatggaactgatgggctgtgaccttaatagctgctctatgcctctcggcatggaatctaaagcaatttccgacgcccagatcacagcctcttcctactttacaaacatgttcgcaacctggtctccatctaaggcaagactgcacttgcagggccggagtaatgcttggaggcctcaggtgaacaatcccaaagagtggctgcaggttgattttcagaagacaatgaaggtgactggggtgaccacacaaggtgttaagagcctgttaacatctatgtacgtgaaggagtttctgatcagctcttctcaggatggccatcaatggaccctatttttccagaacggaaaagttaaggtgttccagggaaaccaggacagctttacccccgtggtgaatagtttggaccctccactcctgacacgttatcttaggatccacccacaaagctgggttcatcagattgccctgagaatggaagtcctggggtgcgaggcacaggacctgtacgggggaggttctctcgtgccaagaggtagtggagggggcggatccggaggaggtggcagcggcggaggaggatctggagggggcgggtcaggggggggcggctccggcggtggtggaagcggaggcgggggaagcggcggcggagggagcggaggtggcggatccggcgggggcggcagcggcggaggtggtagcggggggggtggctctggtggagggggatctggcggtggcggcagtggagggggaggttctggaggcggcggatctggaggaggaggatcaggcggcggaggtagtggaggagggggaagcggcggcggaggcagcggtggcggtggctcaggcggcggaggaggttcactcagttgcaggcctcccatggtgaaactggtgtgtcccgctgataacctgagggccgagggactggagtgcactaagacatgccaaaactacgatctggagtgtatgagcatgggatgtgtgagtggctgtctatgtcctcctggcatggtgcggcacgagaatcggtgcgtcgctctagagcgttgtccatgcttccaccagggcaaggagtacgctcctggcgagacagtaaaaatcggttgtaacacttgtgtttgcagagataggaagtggaactgtacagatcacgtctgcgacgccacatgttccactattggcatggctcactacctgaccttcgacggtctgaagtatctgttccctggcgaatgtcagtatgtgctggtacaggattactgcgggagtaatcccggtacttttaggatcctggtcggaaataagggttgtagtcacccttccgtaaagtgtaagaaacgggtgaccatccttgtcgaggggggggaaatcgagctgtttgacggcgaggtgaatgtgaagaggcctatgaaggatgagactcattttgaggtggtggagtctggccgctatattattctgctgctcggcaaagcactctctgttgtgtgggatcggcacctgtcaatcagcgtggtgcttaagcagacataccaggagaaagtgtgcggcctctgtggaaacttcgacgggatccagaacaatgatctgaccagctctaatctccaggtggaggaggatccagtggactttggaaattcctggaaagtgagttcccagtgtgcagacaccagaaaggtccctctggactctagccccgctacctgtcacaataacatcatgaagcagacaatggttgacagctcttgtcgcattttgactagtgatgtgttccaggattgtaataagctggttgacccagaaccctatttggatgtgtgtatctatgacacatgctcttgtgagtctatcggtgactgtgcctgtttctgcgatacaatcgccgcttacgcgcatgtttgcgcacagcacggtaaagtggtaacttggcgaacggcaacactttgtccccagtcctgtgaggaacgtaatcttcgtgaaaacggctatgagtgtgagtggcgatataatagctgcgcgccagcatgtcaagtgacatgccagcatcctgagcctctagcttgtccagtgcagtgcgttgagggttgccatgctcactgtccacccggcaagattctggatgaacttctgcagacatgcgtggatccagaggattgtccagtttgtgaagtggccggccgtaggtttgctagtggtaaaaaggtgaccctgaatcccagtgacccagagcattgccagatctgccactgcgacgtggtgaacctgacatgtgaagcttgccaggaacctggagggctggttgtgcctcctaccgacgcaccagtgtctcccactacactgtatgtggaggatatcagtgagccacctctgcatgatttctgataa

SEQ ID NO: 59 - DNA, 6630 bp, Artificial Sequence
  scFVIII/D'D3-120-TH1
gccaccagaagatattacctgggcgccgtggaactgtcctgggactacatgcagtctgatctgggcgagctgcccgtggatgccagatttcctccaagagtgcccaagagcttccccttcaacacctccgtggtgtacaagaaaaccctgttcgtggaattcaccgaccacctgttcaatatcgccaagcctagacctccttggatgggcctgctgggacctacaattcaggccgaggtgtacgacaccgtggtcatcaccctgaagaacatggcttctcaccccgtgtctctgcacgccgtgggagtgtcttattggaaggcttctgagggcgccgagtacgacgatcagaccagccagagagagaaagaggacgacaaggttttccctggcggctcccacacctatgtgtggcaggtcctgaaagaaaacggccccatggcctctgatcctctgtgcctgacctactcctacctgtctcacgtggacctggtcaaggacctgaattctggactgatcggcgctctgctcgtgtgcagagagggaagcctggccaaagaaaagacccagacactgcacaagttcatcctgctgttcgccgtgttcgacgagggcaagtcctggcactccgagacaaagaactctctgatgcaggacagggacgccgcctctgctagagcttggcctaagatgcacaccgtgaacggctacgtgaacagatccctgcctggcctgatcggatgccacagaaagtctgtgtactggcacgtgatcggcatgggcacaacacctgaggtgcactccatctttctggaaggccacaccttcctcgtgcggaaccatagacaggccagcctggaaatctcccctatcacctttctgaccgctcagaccctgctgatggatctgggccagtttctgctgttctgtcacatctccagccaccagcacgacggcatggaagcttacgtgaaggtggacagctgccccgaggaaccccagctgagaatgaagaacaacgaggaagccgaggactacgacgacgacctgaccgactctgagatggatgtcgtcagattcgacgacgataactcccctagcttcatccagattcggagcgtggccaagaagcaccctaagacttgggtgcactatatcgccgccgaggaagaggattgggattacgctcctctggtgctggcccctgacgacagatcctacaagtcccagtacctgaacaacggccctcagcggatcggccggaagtataagaaagtgcggttcatggcctacaccgacgagacattcaagaccagagaggctatccagcacgagtccggaattctgggacctctgctgtatggcgaagtgggcgacacactgctgatcatcttcaagaaccaggcctctcggccctacaacatctaccctcatggcatcacagacgtgcggcctctgtactctagaaggctgcctaagggcgtgaagcacctgaaggacttccctattctgcccggcgagatcttcaagtacaagtggaccgtgaccgtggaagatggccccaccaagtctgaccctagatgtctgacccggtactactcctccttcgtgaacatggaaagagatctggcctccggcctgattggccctctgctgatctgctacaaagaatccgtggaccagcggggcaaccagatcatgtccgacaagcggaacgtgatcctgttctctgtgttcgatgagaaccggtcctggtatctgaccgagaacatccagcggtttctgcccaatcctgctggcgtgcagctggaagatcctgagttccaggcctccaacatcatgcacagcatcaacggctatgtgttcgactccctgcagctgtctgtgtgtctgcacgaggtggcctactggtacatcctgtctatcggagcccagaccgacttcctgtccgtgttcttctccggctacaccttcaagcacaagatggtgtacgaggacaccctgacactgttccctttctccggcgaaaccgtgttcatgtccatggaaaaccccggcctgtggatcctgggctgccacaactctgacttccggaacagaggcatgaccgctctgctgaaggtgtcctcctgtgacaagaacaccggcgactactacgaggactcttacgaggatatctccgcctacctgctgtccaagaacaatgccatcgagccccggtccttcagccagaactctagacacccttccaccagacagaagcagttcaacgccaccaccattccagagaacgacatcgaaaagaccgatccttggtttgcccacagaacccctatgcctaagtgccagaacgtgtcctccagcgacctgctcatgctgctgagacagtctccaacacctcacggcctgtctctgtctgacctgcaagaggctaagtacgagactttcagcgacgacccttctcctggcgccatcgactctaacaactccctgtccgagatgacccacttcagacctcagctgcaccactccggcgatatggtgtttacccctgagtctggcctgcagctcagactgaatgagaagctgggcaccaccgctgccaccgagctgaagaaactggacttcaaggtgtccagcacctccaacaacctgatcagcacaatcccttccgacaacctggccgctggcaccgataatacctctacactgcagtccgaccaagaggaaatcgattacgacgacaccatcagcgtcgagatgaagaaagaagatttcgacatctacgacgaggacgagaaccagtctcctcggagcttccagaagaaaaccagacactactttatcgccgctgtggaacggctgtgggactacggaatgtcctcttctcctcacgtgctgcggaatagagcccagtctggctccgtgcctcagttcaagaaagtggtgttccaagagttcaccgacggcagcttcacccagcctctgtatagaggcgagctgaacgagcatctgggactgctgggcccttatatcagagccgaggtcgaggataacatcatggtcaccttcagaaaccaggccagcagaccctactccttctactccagcctgatctcctacgaagaggaccagagacaaggcgccgagcctcggaagaacttcgtgaagcctaacgagactaagacctacttttggaaggtgcagcaccacatggctcctaccaaggacgagttcgattgcaaggcctgggcctacttctccgatgtggatctggaaaaggacgtgcactccgggctgatcggaccactgcttgtgtgtcacaccaacacactgaaccctgctcacggcaggcaagtgacagtgcaagagttcgccctgttcttcaccatcttcgacgaaacaaagtcctggtacttcaccgaaaacatggaacggaactgcagagccccttgcaacatccagatggaagatcccaccttcaaagagaactaccggttccacgccatcaatggctacatcatggataccctgccaggcctcgtgatggctcaggatcagcgcatcagatggtatctgctgagcatgggctccaacgagaatatccactccatccacttcagcggccacgtgttcaccgtgcggaaaaaagaagagtacaagatggctctgtacaatctgtaccccggcgtgttcgagacagtggaaatgctgccttctaaggccggcatctggcgcgtggaatgtctgatcggagagcatctgcatgccggaatgtctaccctgttcctggtgtactccaacaagtgtcagacccctctcggcatggcttccggccatatcagagacttccagatcaccgcttccggacagtatggccagtgggctcctaagctggccagactgcactactctggctccatcaacgcctggtctaccaaagagcccttcagctggatcaaggtggacctgctggctcccatgatcatccacggcatcaagacacagggcgctagacagaagttcagctccctgtacatctcccagttcatcatcatgtactccctggacggcaagaagtggcagacctacagaggcaactccaccggcacactcatggtgttcttcggcaacgtggactcctccggcattaagcacaacatcttcaaccctccaatcattgcccggtacatccggctgcaccccacacactactccatcagatctaccctgagaatggaactgatgggctgcgacctgaactcctgttctatgcccctcggaatggaatccaaggccatcagcgacgcccagattaccgcctcctcctacttcaccaacatgttcgccacttggagcccctctaaggccaggctgcatctgcagggcagatctaatgcttggcggcctcaagtgaacaaccccaaagagtggctgcaggtcgactttcagaaaaccatgaaggtcacaggcgtgacaacccagggcgtcaagtccctgctgacctctatgtacgtgaaagagttcctgatctctagcagccaggacggccaccagtggaccctgtttttccagaacggcaaagtgaaggtgttccagggcaatcaggattctttcacccctgtggtcaacagcctggatcctccactgctgaccagatacctgcggatccatcctcagtcctgggtgcaccagattgctctgcgaatggaagtgctgggatgtgaagcccaagatctgtacggcggaggctctctggttcctagaggatctggcggtggtggttctggcggcggaggaagcggaggcggaggtagtggtggcggtggaagtggcggtggcggatccggtggcggcggatctggcggaggcggcagcggcggtggtggtagcggcggaggcggctcaggtggcggaggcagtggcggcggaggttcaggcggtggtggaagtggcggcggtggctctggcggtggcggctcaggcggtggtggctccggcggaggcggaagcggcggaggcggcagcggaggcggaggctctggtggcggaggttccggtggcggaggcagcggcggaggcggctctggcggaggtggtggatctttgtcttgtcggcctcctatggtcaagctcgtgtgtcccgccgataatctgagagccgaaggactggaatgcaccaagacctgccagaactacgacctcgagtgcatgtctatgggctgtgtgtccggatgtctgtgccctcctggcatggtccgacacgagaatagatgcgtggccctggaaagatgcccctgcttccaccaaggcaaagagtacgctcctggcgagactgtgaagatcggctgcaacacctgtgtgtgtcgggacagaaagtggaactgcacagaccacgtgtgcgacgccacatgctctaccatcggaatggcccactacctgaccttcgacggcctgaagtacctgtttccaggcgagtgccagtatgtgctggtgcaggactactgtggcagcaaccccggcacctttagaatcctcgtgggcaacaagggctgctctcacccctccgtgaaatgcaagaagcgggtcacaatcctggtcgaaggcggagagatcgagctgttcgacggcgaagtgaacgtgaagcggcccatgaaggacgagacacacttcgaggttgtggaatccggccggtacattatcctgctgctgggcaaagctctgtccgtcgtgtgggatagacacctgtccatttccgtggtgctgaagcagacctatcaagagaaagtgtgcggcctgtgcggcaactttgacggcatccagaacaatgacctgacctccagcaatctccaggtcgaagaggatcccgtggatttcggcaactcctggaaagtgtccagccagtgcgccgacacaagaaaggtgccactggattctagccctgccacctgtcacaacaatatcatgaagcaaaccatggtggactccagctgccggatcctgacatccgatgtgtttcaggactgcaacaagctggtggaccccgagccttacctggacgtgtgtatctacgatacctgctcctgcgagtctatcggcgactgcgcctgcttttgcgacacaatcgctgcttacgcccatgtgtgcgctcagcatggaaaggtggtcacttggagaaccgccacactgtgtccccagtcctgcgaggaaagaaacctgcgcgagaatggctatgagtgcgagtggcggtacaactcttgtgcccctgcctgtcaagtgacctgtcagcatcctgaaccactggcttgtcccgtgcagtgcgtggaaggctgtcatgctcattgcccaccaggcaagatcctggatgagctgctgcagacctgtgtggatccagaggattgtcctgtgtgcgaagtggccggcagaagattcgcctccggaaagaaagtgaccctgaatcctagcgaccctgagcactgccagatctgccactgtgatgtcgtgaacctgacctgcgaggcttgtcaagaacctggcggactggtggtgcctcctacagatgctcctgtgtctcccaccacactgtacgtcgaggacatctctgagccacctctgcacgatttctgatag

SEQ ID NO: 60 - DNA, 6630 bp, Artificial Sequence
  scFVIII/D'D3-120-TH1
gctactcgtcgttactacctgggagctgtcgagctgagctgggattacatgcagtctgacctgggagagctgcctgtggacgctaggtttccacctcgggtgcctaagtccttccccttcaacaccagcgtggtgtataagaagaccctgttcgtggagtttacagatcacctgttcaacatcgctaagcctagaccaccctggatgggcctgctgggcccaacaatccaggccgaggtgtacgacaccgtggtcatcaccctgaagaacatggcttcccaccctgtgagcctgcatgctgtgggcgtgtcctactggaaggccagcgagggcgctgagtatgacgatcagacctctcagcgcgagaaggaggacgataaggtgtttccaggcggctcccatacctacgtgtggcaggtgctgaaggagaatggcccaatggcttctgatcccctgtgcctgacctactcttatctgtcccacgtggacctggtgaaggatctgaacagcggcctgatcggcgctctgctggtgtgcagggagggctctctggccaaggagaagacccagacactgcataagttcatcctgctgttcgccgtgtttgacgagggcaagagctggcactctgagacaaagaattctctgatgcaggacagagatgctgcttccgccagggcttggccaaagatgcatacagtgaacggctacgtgaatagatccctgcctggcctgatcggatgccacaggaagagcgtgtattggcatgtgatcggcatgggcaccacaccagaggtgcactctatcttcctggagggccatacctttctggtgaggaatcaccggcaggcttctctggagatctcccccatcaccttcctgacagcccagaccctgctgatggatctgggccagttcctgctgttttgccacatctccagccaccagcatgatggcatggaggcttacgtgaaggtggactcctgtcctgaggagccacagctgaggatgaagaacaatgaggaggccgaggactatgacgatgacctgaccgactctgagatggatgtggtgaggttcgatgacgataactcccccagctttatccagatccggtccgtggccaagaagcaccctaagacatgggtgcattacatcgccgctgaggaggaggactgggattatgctcctctggtgctggccccagacgatcggtcctacaagagccagtatctgaacaatggcccccagagaatcggccgcaagtacaagaaggtgagattcatggcttatacagatgagacattcaagacacgcgaggccatccagcacgagagcggaatcctgggacctctgctgtacggagaagtgggcgacaccctgctgatcatctttaagaaccaggccagcagaccctacaatatctatcctcatggcatcacagatgtgcgcccactgtactctaggcggctgcccaagggcgtgaagcacctgaaggacttccccatcctgcctggcgagatctttaagtataagtggaccgtgacagtggaggatggcccaaccaagagcgaccccagatgcctgacacgctactattcttccttcgtgaatatggagcgggatctggcttctggcctgatcggaccactgctgatctgttacaaggagtctgtggatcagaggggcaaccagatcatgtccgacaagcggaatgtgatcctgttcagcgtgtttgacgagaacaggtcttggtatctgactgagaacatccagcggttcctgcctaatccagctggcgtgcagctggaggatcctgagtttcaggcctctaacatcatgcattccatcaatggctacgtgttcgacagcctgcagctgtccgtgtgcctgcacgaggtggcttactggtatatcctgtccatcggcgcccagaccgatttcctgtccgtgttctttagcggctacaccttcaagcataagatggtgtatgaggacaccctgacactgttcccattttccggcgagacagtgttcatgagcatggagaatcccggcctgtggatcctgggctgccacaacagcgatttcaggaatcggggcatgaccgccctgctgaaggtgagctcttgtgacaagaacacaggcgactactatgaggatagctacgaggacatctctgcttatctgctgtccaagaacaatgccatcgagcccagatctttttcccagaattctaggcatccttccacccggcagaagcagttcaacgctaccacaatcccagagaatgatatcgagaagaccgacccctggtttgcccataggacacccatgcctaagtgtcagaacgtgtccagctctgatctgctgatgctgctgaggcagtctccaaccccacacggcctgagcctgtctgacctgcaggaggctaagtacgagacattcagcgacgatccttctccaggcgccatcgattccaacaattccctgagcgagatgacccacttcaggcctcagctgcaccatagcggcgacatggtgtttacaccagagtctggcctgcagctgcggctgaacgagaagctgggcaccacagccgctaccgagctgaagaagctggactttaaggtgtccagcacctccaacaatctgatctccacaatccctagcgataacctggccgctggcaccgacaatacctctacactgcagtccgatcaggaggagatcgactacgacgatacaatcagcgtggagatgaagaaggaggacttcgatatctatgacgaggatgagaaccagtctccaagatccttccagaagaagacccgccattactttatcgccgctgtggagaggctgtgggattatggcatgtcttccagccctcacgtgctgagaaatcgcgcccagtctggctccgtgccacagttcaagaaggtggtgttccaggagtttaccgacggcagctttacacagccactgtacagaggcgagctgaacgagcacctgggcctgctgggaccatatatcagggctgaggtggaggataacatcatggtgaccttcagaaatcaggccagccgcccatactctttttattcttccctgatctcttacgaggaggaccagaggcagggagctgagcctcggaagaacttcgtgaagccaaatgagacaaagacatacttttggaaggtgcagcaccatatggcccccaccaaggacgagttcgattgcaaggcctgggcttacttctccgacgtggatctggagaaggacgtgcactccggcctgattggaccactgctggtgtgccataccaacacactgaatcctgctcacggcaggcaggtgaccgtgcaggagttcgccctgttctttaccatctttgatgagacaaagtcctggtacttcacagagaacatggagaggaattgtcgggctccctgcaatatccagatggaggaccctaccttcaaggagaactaccggtttcatgctatcaatggctatatcatggatacactgccaggcctggtcatggcccaggaccagaggatccggtggtacctgctgagcatgggctctaacgagaatatccactccatccatttcagcggccacgtgtttaccgtgagaaagaaggaggagtataagatggccctgtacaacctgtatccaggcgtgttcgagacagtggagatgctgcccagcaaggctggcatctggagggtggagtgcctgatcggagagcacctgcatgccggcatgtctaccctgtttctggtgtactccaataagtgtcagacacctctgggcatggcttctggccatatcagagatttccagatcaccgcttccggacagtacggacagtgggctccaaagctggctcgcctgcactatagcggctctatcaacgcctggtctaccaaggagccattttcctggatcaaggtggacctgctggctcccatgatcatccatggcatcaagacacagggcgccagacagaagttcagctctctgtacatcagccagtttatcatcatgtattctctggatggcaagaagtggcagacctaccgcggcaatagcaccggcacactgatggtgttctttggcaacgtggactccagcggcatcaagcacaacatcttcaatcctccaatcatcgctagatacatccgcctgcaccccacccattattccatcaggagcacactgcggatggagctgatgggctgcgatctgaactcctgtagcatgcctctgggcatggagtctaaggccatctccgacgctcagatcaccgcctcttcctacttcaccaatatgtttgctacatggtccccctccaaggcccggctgcatctgcagggcaggtctaacgcctggcggcctcaggtgaacaatccaaaggagtggctgcaggtggattttcagaagaccatgaaggtgacaggcgtgaccacacagggcgtgaagagcctgctgacctctatgtatgtgaaggagttcctgatcagctcttcccaggacggccaccagtggacactgttctttcagaacggcaaggtgaaggtgttccagggcaatcaggattcctttaccccagtggtgaacagcctggacccccctctgctgacaaggtacctgcggatccacccccagtcctgggtgcatcagatcgctctgagaatggaggtgctgggatgcgaggctcaggacctgtatggaggcggcagcctggtgccccgcggcagtggcggcggcggcagcggcggcggcggctccggcggcggtggttctggtggtggtggttccggtggtggcggctccggcggcggaggttctggtggtggtggatccggtggaggcggctccggcggcgggggttctggtggtggtgggtccggtgggggcggctccggcggcggcggttctggtggtggtggctccggtggcggtggctccggcggcggtggatctggtggtggtggtagcggtggcggaggctccggcggcggtgggtctggtggtggtggttcaggcggcggcggctccggaggaggaggaagcggcggaggaggaggcagcctgtcttgcaggccacccatggtgaagctggtgtgccctgctgataatctgcgggccgagggcctggagtgtaccaagacatgccagaactacgacctggagtgcatgtctatgggatgcgtgtccggatgcctgtgccctccaggcatggtgagacatgagaaccgctgcgtggctctggagagatgcccttgttttcaccagggcaaggagtatgccccaggcgagacagtgaagatcggctgcaatacatgcgtgtgcagggacaggaagtggaactgtaccgatcacgtgtgcgacgctacctgcagcacaatcggcatggcccactacctgacattcgatggcctgaagtatctgtttccaggcgagtgccagtacgtgctggtgcaggactattgtggctctaatcctggcaccttcagaatcctggtgggcaacaagggctgctctcacccatccgtgaagtgtaagaagcgcgtgacaatcctggtggagggcggcgagatcgagctgtttgatggcgaagtgaatgtgaagaggcccatgaaggacgagacacatttcgaggtggtggagtccggccggtacatcatcctgctgctgggcaaggccctgagcgtggtgtgggacaggcacctgtccatcagcgtggtgctgaagcagacctatcaggagaaggtgtgcggcctgtgcggcaactttgatggcatccagaacaatgacctgacaagctctaatctgcaggtggaggaggaccctgtggatttcggcaactcttggaaggtgtccagccagtgcgctgataccaggaaggtgcccctggactcttcccctgccacctgtcacaacaatatcatgaagcagacaatggtggatagctcttgccggatcctgacatccgacgtgttccaggactgtaacaagctggtggaccccgagccttacctggacgtgtgcatctatgacacctgcagctgtgagtctatcggcgattgcgcttgtttctgcgacacaatcgccgcttacgctcacgtgtgcgcccagcatggcaaggtggtgacctggaggaccgccaccctgtgcccacagtcctgcgaggagagaaacctgcgcgagaatggctacgagtgcgagtggcggtataacagctgtgcccccgcttgccaggtgacctgtcagcacccagagcccctggcttgccctgtgcagtgcgtggagggatgccacgctcattgtccacctggcaagatcctggatgagctgctgcagacctgcgtggaccccgaggattgtcccgtgtgcgaggtggctggcagacgcttcgcttccggcaagaaggtgacactgaatccaagcgatcccgagcactgtcagatctgtcattgcgacgtggtgaacctgacctgtgaggcttgccaggagcctggaggcctggtggtgccacccacagacgcccctgtcagcccaactaccctgtatgtggaagatatttcagagccccccctgcacgatttctgataa

SEQ ID NO: 61 - DNA, 6630 bp, Artificial Sequence
  scFVIII/D'D3-120-TH2
gccaccagaagatactacctgggtgcagtggaactgtcatgggactatatgcaaagtgatctcggtgagctgcctgtggacgcaagatttcctcctagagtgccaaaatcttttccattcaacacctcagtcgtgtacaaaaagactctgtttgtagaattcacggatcaccttttcaacatcgctaagccaaggccaccctggatgggtctgctaggtcctaccatccaggctgaggtttatgatacagtggtcattacacttaagaacatggcttcccatcctgtcagtcttcatgctgttggtgtatcctactggaaagcttctgagggagctgaatatgatgatcagaccagtcaaagggagaaagaagatgataaagtcttccctggtggaagccatacatatgtctggcaggtcctgaaagagaatggtccaatggcctctgacccactgtgccttacctactcatatctttctcatgtggacctggtaaaagacttgaattcaggcctcattggagccctactagtatgtagagaagggagtctggccaaggaaaagacacagaccttgcacaaatttatactactttttgctgtatttgatgaagggaaaagttggcactcagaaacaaagaactccttgatgcaggatagggatgctgcatctgctcgggcctggcctaaaatgcacacagtcaatggttatgtaaacaggtctctgccaggtctgattggatgccacaggaaatcagtctattggcatgtgattggaatgggcaccactcctgaagtgcactcaatattcctcgaaggtcacacatttcttgtgaggaaccatcgccaggcgtccttggaaatctcgccaataactttccttactgctcaaacactcttgatggaccttggacagtttctactgttttgtcatatctcttcccaccaacatgatggcatggaagcttatgtcaaagtagacagctgtccagaggaaccccaactacgaatgaaaaataatgaagaagcggaagactatgatgatgatcttactgattctgaaatggatgtggtcaggtttgatgatgacaactctccttcctttatccaaattcgctcagttgccaagaagcatcctaaaacttgggtacattacattgctgctgaagaggaggactgggactatgctcccttagtcctcgcccccgatgacagaagttataaaagtcaatatttgaacaatggccctcagcggattggtaggaagtacaaaaaagtccgatttatggcatacacagatgaaacctttaagactcgtgaagctattcagcatgaatcaggaatcttgggacctttactttatggggaagttggagacacactgttgattatatttaagaatcaagcaagcagaccatataacatctaccctcacggaatcactgatgtccgtcctttgtattcaaggagattaccaaaaggtgtaaaacatttgaaggattttccaattctgccaggagaaatattcaaatataaatggacagtgactgtagaagatgggccaactaaatcagatcctcggtgcctgacccgctattactctagtttcgttaatatggagagagatctagcttcaggactcattggccctctcctcatctgctacaaagaatctgtagatcaaagaggaaaccagataatgtcagacaagaggaatgtcatcctgttttctgtatttgatgagaaccgaagctggtacctcacagagaatatacaacgctttctccccaatccagctggagtgcagcttgaggatccagagttccaagcctccaacatcatgcacagcatcaatggctatgtttttgatagtttgcagttgtcagtttgtttgcatgaggtggcatactggtacattctaagcattggagcacagactgacttcctttctgtcttcttctctggatataccttcaaacacaaaatggtctatgaagacacactcaccctattcccattctcaggagaaactgtcttcatgtcgatggaaaacccaggtctatggattctggggtgccacaactcagactttcggaacagaggcatgaccgccttactgaaggtttctagttgtgacaagaacactggtgattattacgaggacagttatgaagatatttcagcatacttgctgagtaaaaacaatgccattgaaccaagaagcttctcccagaattcaagacaccctagcactaggcaaaagcaatttaatgccaccacaattccagaaaatgacatagagaagactgacccttggtttgcacacagaacacctatgcctaaatgtcaaaatgtctcctctagtgatttgttgatgctcttgcgacagagtcctactccacatgggctatccttatctgatctccaagaagccaaatatgagactttttctgatgatccatcacctggagcaatagacagtaataacagcctgtctgaaatgacacacttcaggccacagctccatcacagtggggacatggtatttacccctgagtcaggcctccaattaagattaaatgagaaactggggacaactgcagcaacagagttgaagaaacttgatttcaaagtttctagtacatcaaataatctgatttcaacaattccatcagacaatttggcagcaggtactgataatacaagtactcttcagtcagatcaagaggaaattgactatgatgataccatatcagttgaaatgaagaaggaagattttgacatttatgatgaggatgaaaatcagagcccccgcagctttcaaaagaaaacacgacactattttattgctgcagtggagaggctctgggattatgggatgagtagctccccacatgttctaagaaacagggctcagagtggcagtgtccctcagttcaagaaagttgttttccaggaatttactgatggctcctttactcagcccttataccgtggagaactaaatgaacatttgggactcctggggccatatataagagcagaagttgaagataatatcatggtaactttcagaaatcaggcctctcgtccctattccttctattctagccttatttcttatgaggaagatcagaggcaaggagcagaacctagaaaaaactttgtcaagcctaatgaaaccaaaacttacttttggaaagtgcaacatcatatggcacccactaaagatgagtttgactgcaaagcctgggcttatttctctgatgttgacctggaaaaagatgtgcactcaggcctgattggaccccttctggtctgccacactaacacactgaaccctgctcatgggagacaagtgacagtacaggaatttgctctgtttttcaccatctttgatgagaccaaaagctggtacttcactgaaaatatggaaagaaactgcagggctccctgcaatatccagatggaagatcccacttttaaagagaattatcgcttccatgcaatcaatggctacataatggatacactacctggcttagtaatggctcaggatcaaaggattcgatggtatctgctcagcatgggcagcaatgaaaacatccattctattcatttcagtggacatgtgttcactgtacgaaaaaaagaggagtataaaatggcactgtacaatctctatccaggtgtttttgagacagtggaaatgttaccatccaaagctggaatttggcgggtggaatgccttattggcgagcatctacatgctgggatgagcacactttttctggtgtacagcaataagtgtcagactcccctgggaatggcttctggacacattagagattttcagattacagcttcaggacaatatggacagtgggccccaaagctggccagacttcattattccggatcaatcaatgcctggagcaccaaggagcccttttcttggatcaaggtggatctgttggcaccaatgattattcacggcatcaagacccagggtgcccgtcagaagttctccagcctctacatctctcagtttatcatcatgtatagtcttgatgggaagaagtggcagacttatcgaggaaattccactggaaccttaatggtcttctttggcaatgtggattcatctgggataaaacacaatatttttaaccctccaattattgctcgatacatccgtttgcacccaactcattatagcattcgcagcactcttcgcatggagttgatgggctgtgatttaaatagttgcagcatgccattgggaatggagagtaaagcaatatcagatgcacagattactgcttcatcctactttaccaatatgtttgccacctggtctccttcaaaagctcgacttcacctccaagggaggagtaatgcctggagacctcaggtgaataatccaaaagagtggctgcaagtggacttccagaagacaatgaaagtcacaggagtaactactcagggagtaaaatctctgcttaccagcatgtatgtgaaggagttcctcatctccagcagtcaagatggccatcagtggactctcttttttcagaatggcaaagtaaaggtttttcagggaaatcaagactccttcacacctgtggtgaactctctagacccaccgttactgactcgctaccttcgaattcacccccagagttgggtgcaccagattgccctgaggatggaggttctgggctgcgaggcacaggacctctacctgagtaaaaacaatgccattgaaccaagagggggtggaggttcaggaggtggaggttcaggaggtggaggttcaggaggtggaggttcaggaggtggaggttcaggaggtggaggttcaggaggtggaggttcaggaggtggaggttcaggaggtggaggttcaggaggtggaggttcaggaggtggaggttcaggaggtggaggttcaggaggtggaggttcaggaggtggaggttcaggaggtggaggttcaggaggtggaggttcaggaggtggaggttcaggaggtggaggttcaggaggtggaggttcaggaggtggaggttcaggaggtggaggttcaggaggtggaggtggtagcctatcctgtcggccccccatggtcaagctggtgtgtcccgctgacaacctgcgggctgaagggctcgagtgtaccaaaacgtgccagaactatgacctggagtgcatgagcatgggctgtgtctctggctgcctctgccccccgggcatggtccggcatgagaacagatgtgtggccctggaaaggtgtccctgcttccatcagggcaaggagtatgcccctggagaaacagtgaagattggctgcaacacttgtgtctgtcgggaccggaagtggaactgcacagaccatgtgtgtgatgccacgtgctccacgatcggcatggcccactacctcaccttcgacgggctcaaatacctgttccccggggagtgccagtacgttctggtgcaggattactgcggcagtaaccctgggacctttcggatcctagtggggaataagggatgcagccacccctcagtgaaatgcaagaaacgggtcaccatcctggtggagggaggagagattgagctgtttgacggggaggtgaatgtgaagaggcccatgaaggatgagactcactttgaggtggtggagtctggccggtacatcattctgctgctgggcaaagccctctccgtggtctgggaccgccacctgagcatctccgtggtcctgaagcagacataccaggagaaagtgtgtggcctgtgtgggaattttgatggcatccagaacaatgacctcaccagcagcaacctccaagtggaggaagaccctgtggactttgggaactcctggaaagtgagctcgcagtgtgctgacaccagaaaagtgcctctggactcatcccctgccacctgccataacaacatcatgaagcagacgatggtggattcctcctgtagaatccttaccagtgacgtcttccaggactgcaacaagctggtggaccccgagccatatctggatgtctgcatttacgacacctgctcctgtgagtccattggggactgcgcctgcttctgcgacaccattgctgcctatgcccacgtgtgtgcccagcatggcaaggtggtgacctggaggacggccacattgtgcccccagagctgcgaggagaggaatctccgggagaacgggtatgagtgtgagtggcgctataacagctgtgcacctgcctgtcaagtcacgtgtcagcaccctgagccactggcctgccctgtgcagtgtgtggagggctgccatgcccactgccctccagggaaaatcctggatgagcttttgcagacctgcgttgaccctgaagactgtccagtgtgtgaggtggctggccggcgttttgcctcaggaaagaaagtcaccttgaatcccagtgaccctgagcactgccagatttgccactgtgatgttgtcaacctcacctgtgaagcctgccaggagccgggaggcctggtggtgcctcccacagatgccccggtgagccccaccactctgtatgtggaggacatctcggaaccgccgttgcacgatttctgataa

SEQ ID NO: 62 - DNA, 7170 bp, Artificial Sequence
  scFVIII/D'D3-300
gccaccagaagatactacctgggtgcagtggaactgtcatgggactatatgcaaagtgatctcggtgagctgcctgtggacgcaagatttcctcctagagtgccaaaatcttttccattcaacacctcagtcgtgtacaaaaagactctgtttgtagaattcacggatcaccttttcaacatcgctaagccaaggccaccctggatgggtctgctaggtcctaccatccaggctgaggtttatgatacagtggtcattacacttaagaacatggcttcccatcctgtcagtcttcatgctgttggtgtatcctactggaaagcttctgagggagctgaatatgatgatcagaccagtcaaagggagaaagaagatgataaagtcttccctggtggaagccatacatatgtctggcaggtcctgaaagagaatggtccaatggcctctgacccactgtgccttacctactcatatctttctcatgtggacctggtaaaagacttgaattcaggcctcattggagccctactagtatgtagagaagggagtctggccaaggaaaagacacagaccttgcacaaatttatactactttttgctgtatttgatgaagggaaaagttggcactcagaaacaaagaactccttgatgcaggatagggatgctgcatctgctcgggcctggcctaaaatgcacacagtcaatggttatgtaaacaggtctctgccaggtctgattggatgccacaggaaatcagtctattggcatgtgattggaatgggcaccactcctgaagtgcactcaatattcctcgaaggtcacacatttcttgtgaggaaccatcgccaggcgtccttggaaatctcgccaataactttccttactgctcaaacactcttgatggaccttggacagtttctactgttttgtcatatctcttcccaccaacatgatggcatggaagcttatgtcaaagtagacagctgtccagaggaaccccaactacgaatgaaaaataatgaagaagcggaagactatgatgatgatcttactgattctgaaatggatgtggtcaggtttgatgatgacaactctccttcctttatccaaattcgctcagttgccaagaagcatcctaaaacttgggtacattacattgctgctgaagaggaggactgggactatgctcccttagtcctcgcccccgatgacagaagttataaaagtcaatatttgaacaatggccctcagcggattggtaggaagtacaaaaaagtccgatttatggcatacacagatgaaacctttaagactcgtgaagctattcagcatgaatcaggaatcttgggacctttactttatggggaagttggagacacactgttgattatatttaagaatcaagcaagcagaccatataacatctaccctcacggaatcactgatgtccgtcctttgtattcaaggagattaccaaaaggtgtaaaacatttgaaggattttccaattctgccaggagaaatattcaaatataaatggacagtgactgtagaagatgggccaactaaatcagatcctcggtgcctgacccgctattactctagtttcgttaatatggagagagatctagcttcaggactcattggccctctcctcatctgctacaaagaatctgtagatcaaagaggaaaccagataatgtcagacaagaggaatgtcatcctgttttctgtatttgatgagaaccgaagctggtacctcacagagaatatacaacgctttctccccaatccagctggagtgcagcttgaggatccagagttccaagcctccaacatcatgcacagcatcaatggctatgtttttgatagtttgcagttgtcagtttgtttgcatgaggtggcatactggtacattctaagcattggagcacagactgacttcctttctgtcttcttctctggatataccttcaaacacaaaatggtctatgaagacacactcaccctattcccattctcaggagaaactgtcttcatgtcgatggaaaacccaggtctatggattctggggtgccacaactcagactttcggaacagaggcatgaccgccttactgaaggtttctagttgtgacaagaacactggtgattattacgaggacagttatgaagatatttcagcatacttgctgagtaaaaacaatgccattgaaccaagaagcttctcccagaattcaagacaccctagcactaggcaaaagcaatttaatgccaccacaattccagaaaatgacatagagaagactgacccttggtttgcacacagaacacctatgcctaaatgtcaaaatgtctcctctagtgatttgttgatgctcttgcgacagagtcctactccacatgggctatccttatctgatctccaagaagccaaatatgagactttttctgatgatccatcacctggagcaatagacagtaataacagcctgtctgaaatgacacacttcaggccacagctccatcacagtggggacatggtatttacccctgagtcaggcctccaattaagattaaatgagaaactggggacaactgcagcaacagagttgaagaaacttgatttcaaagtttctagtacatcaaataatctgatttcaacaattccatcagacaatttggcagcaggtactgataatacaagtactcttcagtcagatcaagaggaaattgactatgatgataccatatcagttgaaatgaagaaggaagattttgacatttatgatgaggatgaaaatcagagcccccgcagctttcaaaagaaaacacgacactattttattgctgcagtggagaggctctgggattatgggatgagtagctccccacatgttctaagaaacagggctcagagtggcagtgtccctcagttcaagaaagttgttttccaggaatttactgatggctcctttactcagcccttataccgtggagaactaaatgaacatttgggactcctggggccatatataagagcagaagttgaagataatatcatggtaactttcagaaatcaggcctctcgtccctattccttctattctagccttatttcttatgaggaagatcagaggcaaggagcagaacctagaaaaaactttgtcaagcctaatgaaaccaaaacttacttttggaaagtgcaacatcatatggcacccactaaagatgagtttgactgcaaagcctgggcttatttctctgatgttgacctggaaaaagatgtgcactcaggcctgattggaccccttctggtctgccacactaacacactgaaccctgctcatgggagacaagtgacagtacaggaatttgctctgtttttcaccatctttgatgagaccaaaagctggtacttcactgaaaatatggaaagaaactgcagggctccctgcaatatccagatggaagatcccacttttaaagagaattatcgcttccatgcaatcaatggctacataatggatacactacctggcttagtaatggctcaggatcaaaggattcgatggtatctgctcagcatgggcagcaatgaaaacatccattctattcatttcagtggacatgtgttcactgtacgaaaaaaagaggagtataaaatggcactgtacaatctctatccaggtgtttttgagacagtggaaatgttaccatccaaagctggaatttggcgggtggaatgccttattggcgagcatctacatgctgggatgagcacactttttctggtgtacagcaataagtgtcagactcccctgggaatggcttctggacacattagagattttcagattacagcttcaggacaatatggacagtgggccccaaagctggccagacttcattattccggatccatcaacgcatggtccaccaaggagccattcagctggatcaaggtggacctcctcgcacctatgatcatccacggcatcaagacccagggcgcaaggcagaagttctccagcctctacatctcccagttcatcatcatgtactccctggacggcaagaagtggcagacctaccgcggcaactccaccggcaccctcatggtcttcttcggcaacgtcgactcctccggcatcaagcacaacatcttcaaccctcctatcatcgccaggtacatccgtctccaccccacccactactccatccgaagcaccctgcgaatggagctcatgggctgcgacctcaactcctgctccatgcccctgggcatggagagcaaggcaatctccgacgctcagatcaccgcatcctcctacttcaccaacatgttcgctacctggagccctagcaaggcccggctccaccttcagggcaggtccaacgcatggcgtccacaggtcaacaaccctaaggagtggctgcaggtcgacttccagaagactatgaaggtcaccggcgtgaccacccagggagtcaagtccctcctcacctccatgtacgtcaaggagttcctcatctcctccagccaggacggccaccagtggaccctcttcttccagaacggaaaggtgaaggtgttccagggaaaccaggactccttcacccccgtcgtcaactccctcgaccccccactcctgacccgttacctgcgtatccatccacagagctgggtccatcagatagccctgagaatggaggtgctgggatgcgaggctcaggacctgtacctggtcccaagaggatctggaggtggaggcagcggcggagggggatcaggcggaggcggatcaggcggcggtggctctggaggtggcggatctggaggaggtggttcaggaggaggtggaagcggtggtggaggttcaggtggaggaggttcaggaggtggtgggtcaggtggggggggatcaggaggtgggggaagtggtggtggaggatctgggggtggtggaagtggtggaggtggtagtggtggaggaggctcaggtggtgggggttctggaggaggaggttctggtgggggaggttcaggcggaggtggaagtgggggtggaggtagtggaggcggtggtagtggcggtggtggcagcggaggaggggggtctggaggaggcggttcaggaggcggagggtctggaggcggaggaagtggggggggtggatcaggagggggaggaagtggcggtggagggagtggaggagggggaagtggaggcggcggttctggagggggcggatctgggggaggaggctctggaggcgggggttcaggaggggggggaagcggcggcggaggcagtggtgggggcggcagtggcgggggcgggagtggtggcggggggtcagggggcggggggagtgggggagggggctcaggcggcggggggagcgggggaggtggttctgggggcgggggctcaggtgggggcgggagcggaggcggtgggtcaggcggaggagggtcaggcggggggggcagtggcggtggggggtctggtggcggtgggagtgggggcggtggtagcggcggtggtggatcaggggggggcggctctggcggcgggggctctggcggaggtggttccgggggcggcgggagcggcggcggtgggtccggcgggggcggcagcctttcttgtcgaccacctatggtaaaacttgtttgtcctgctgataatcttagagcagaaggcttggaatgtacaaaaacttgtcaaaattatgatttggaatgtatgagtatgggctgtgtaagtgggtgtttgtgtcctccaggcatggttcgacatgaaaatcgatgtgtagctcttgaaagatgtccatgttttcatcaaggcaaagaatatgctcctggcgaaactgtaaaaattggctgtaatacatgtgtatgtagagatagaaaatggaattgtacagatcatgtatgtgatgcaacttgttctacaattgggatggcacattatttgacatttgatggcttgaaatatttgtttccaggcgaatgtcaatatgtattggttcaagattattgtggctctaatccaggcacttttaggatacttgttggcaataaaggctgttctcatccaagtgttaaatgtaaaaaaagggttactattcttgttgaaggcggcgaaattgaactttttgatggcgaagttaacgttaaaaggccaatgaaagatgaaacacattttgaggttgttgaaagtggccgctatattattcttttgttggggaaagctctttctgtggtgtgggatcggcatctttctatatctgtggtgttgaaacaaacatatcaagaaaaggtgtgtggcctgtgtggcaactttgacgggattcagaacaacgacctgaccagcagcaacctgcaagtggaggaggaccctgtggactttggcaacagctggaaggtgagctcccagtgcgccgacacccgcaaggtgcctttggactcttctccagctacatgccacaataatattatgaagcagacaatggtggacagcagctgccgcattctgacaagcgacgtgtttcaggactgcaataagctggtggaccccgagccttacctggacgtctgcatatacgacacttgctcctgcgagagcattggcgattgcgcctgcttttgcgatacaattgccgcctacgcccacgtctgcgcccagcacggcaaggtggtgacatggcgcacagccactctgtgccctcagagctgcgaggagcggaatctgcgggagaatggctacgagtgcgagtggcgctataattcctgcgctcccgcctgccaggtcacttgccagcaccccgagcctctggcttgcccagtgcagtgcgtggaaggctgtcatgctcattgccctccaggcaagattctggatgagctgctgcagacatgcgtcgatcccgaggattgccctgtatgcgaggtggctgggcggcggtttgcctctgggaaaaaggtgactctgaatccctctgatcccgagcactgtcaaatatgccactgcgatgtggtgaatctgacttgcgaggcctgtcaagagcccggcggcctggtggtgccccccacagatgcccccgtgtctcccactactctgtatgtggaagatattagcgagccccccctgcacgatttttgataa

SEQ ID NO: 63 - DNA, 8241 bp, Artificial Sequence
  scFVIII/D'D3/D'D3-120
gccaccagaagatactacctgggtgcagtggaactgtcatgggactatatgcaaagtgatctcggtgagctgcctgtggacgcaagatttcctcctagagtgccaaaatcttttccattcaacacctcagtcgtgtacaaaaagactctgtttgtagaattcacggatcaccttttcaacatcgctaagccaaggccaccctggatgggtctgctaggtcctaccatccaggctgaggtttatgatacagtggtcattacacttaagaacatggcttcccatcctgtcagtcttcatgctgttggtgtatcctactggaaagcttctgagggagctgaatatgatgatcagaccagtcaaagggagaaagaagatgataaagtcttccctggtggaagccatacatatgtctggcaggtcctgaaagagaatggtccaatggcctctgacccactgtgccttacctactcatatctttctcatgtggacctggtaaaagacttgaattcaggcctcattggagccctactagtatgtagagaagggagtctggccaaggaaaagacacagaccttgcacaaatttatactactttttgctgtatttgatgaagggaaaagttggcactcagaaacaaagaactccttgatgcaggatagggatgctgcatctgctcgggcctggcctaaaatgcacacagtcaatggttatgtaaacaggtctctgccaggtctgattggatgccacaggaaatcagtctattggcatgtgattggaatgggcaccactcctgaagtgcactcaatattcctcgaaggtcacacatttcttgtgaggaaccatcgccaggcgtccttggaaatctcgccaataactttccttactgctcaaacactcttgatggaccttggacagtttctactgttttgtcatatctcttcccaccaacatgatggcatggaagcttatgtcaaagtagacagctgtccagaggaaccccaactacgaatgaaaaataatgaagaagcggaagactatgatgatgatcttactgattctgaaatggatgtggtcaggtttgatgatgacaactctccttcctttatccaaattcgctcagttgccaagaagcatcctaaaacttgggtacattacattgctgctgaagaggaggactgggactatgctcccttagtcctcgcccccgatgacagaagttataaaagtcaatatttgaacaatggccctcagcggattggtaggaagtacaaaaaagtccgatttatggcatacacagatgaaacctttaagactcgtgaagctattcagcatgaatcaggaatcttgggacctttactttatggggaagttggagacacactgttgattatatttaagaatcaagcaagcagaccatataacatctaccctcacggaatcactgatgtccgtcctttgtattcaaggagattaccaaaaggtgtaaaacatttgaaggattttccaattctgccaggagaaatattcaaatataaatggacagtgactgtagaagatgggccaactaaatcagatcctcggtgcctgacccgctattactctagtttcgttaatatggagagagatctagcttcaggactcattggccctctcctcatctgctacaaagaatctgtagatcaaagaggaaaccagataatgtcagacaagaggaatgtcatcctgttttctgtatttgatgagaaccgaagctggtacctcacagagaatatacaacgctttctccccaatccagctggagtgcagcttgaggatccagagttccaagcctccaacatcatgcacagcatcaatggctatgtttttgatagtttgcagttgtcagtttgtttgcatgaggtggcatactggtacattctaagcattggagcacagactgacttcctttctgtcttcttctctggatataccttcaaacacaaaatggtctatgaagacacactcaccctattcccattctcaggagaaactgtcttcatgtcgatggaaaacccaggtctatggattctggggtgccacaactcagactttcggaacagaggcatgaccgccttactgaaggtttctagttgtgacaagaacactggtgattattacgaggacagttatgaagatatttcagcatacttgctgagtaaaaacaatgccattgaaccaagaagcttctcccagaattcaagacaccctagcactaggcaaaagcaatttaatgccaccacaattccagaaaatgacatagagaagactgacccttggtttgcacacagaacacctatgcctaaatgtcaaaatgtctcctctagtgatttgttgatgctcttgcgacagagtcctactccacatgggctatccttatctgatctccaagaagccaaatatgagactttttctgatgatccatcacctggagcaatagacagtaataacagcctgtctgaaatgacacacttcaggccacagctccatcacagtggggacatggtatttacccctgagtcaggcctccaattaagattaaatgagaaactggggacaactgcagcaacagagttgaagaaacttgatttcaaagtttctagtacatcaaataatctgatttcaacaattccatcagacaatttggcagcaggtactgataatacaagtactcttcagtcagatcaagaggaaattgactatgatgataccatatcagttgaaatgaagaaggaagattttgacatttatgatgaggatgaaaatcagagcccccgcagctttcaaaagaaaacacgacactattttattgctgcagtggagaggctctgggattatgggatgagtagctccccacatgttctaagaaacagggctcagagtggcagtgtccctcagttcaagaaagttgttttccaggaatttactgatggctcctttactcagcccttataccgtggagaactaaatgaacatttgggactcctggggccatatataagagcagaagttgaagataatatcatggtaactttcagaaatcaggcctctcgtccctattccttctattctagccttatttcttatgaggaagatcagaggcaaggagcagaacctagaaaaaactttgtcaagcctaatgaaaccaaaacttacttttggaaagtgcaacatcatatggcacccactaaagatgagtttgactgcaaagcctgggcttatttctctgatgttgacctggaaaaagatgtgcactcaggcctgattggaccccttctggtctgccacactaacacactgaaccctgctcatgggagacaagtgacagtacaggaatttgctctgtttttcaccatctttgatgagaccaaaagctggtacttcactgaaaatatggaaagaaactgcagggctccctgcaatatccagatggaagatcccacttttaaagagaattatcgcttccatgcaatcaatggctacataatggatacactacctggcttagtaatggctcaggatcaaaggattcgatggtatctgctcagcatgggcagcaatgaaaacatccattctattcatttcagtggacatgtgttcactgtacgaaaaaaagaggagtataaaatggcactgtacaatctctatccaggtgtttttgagacagtggaaatgttaccatccaaagctggaatttggcgggtggaatgccttattggcgagcatctacatgctgggatgagcacactttttctggtgtacagcaataagtgtcagactcccctgggaatggcttctggacacattagagattttcagattacagcttcaggacaatatggacagtgggccccaaagctggccagacttcattattccggaagcatcaacgcatggtccaccaaggagcctttctcctggatcaaggtggacctgcttgcacctatgatcatccacggaatcaagacccagggcgctcgtcaaaagttctcctccctgtacatctcccagttcatcatcatgtactccctggacggaaagaagtggcagacctacaggggaaactccaccggcaccctgatggtcttcttcggaaacgtggactccagcggaatcaagcacaacatcttcaaccctcccatcatcgcccgttacatccgtctccaccctacccactactccatccgttccacccttcgtatggagctgatgggatgcgatctcaacagctgctccatgcccctcggaatggaaagcaaggcaatctccgacgctcaaatcaccgcttcctcctacttcaccaacatgttcgccacctggtccccatcaaaggcacgacttcacctgcaaggacgttccaacgcatggcgacctcaagtaaacaaccctaaggagtggctgcaagtggacttccagaagaccatgaaggtgaccggagtgaccacccaaggagtaaagtccctcctcacctccatgtacgtcaaggagttcctgatctcctcatcacaagacggacatcagtggacccttttcttccagaacggcaaggtgaaggtcttccagggcaaccaggactccttcacccctgtagtcaactccctcgaccctccattgctcacccgatacttgcgaatccatccacagtcctgggttcatcagatcgcactccgaatggaagtcctgggctgtgaggcacaagacctttacctggtgcctagaggaagcggaggcggaggaagtggaggcggtggatctggtggcgggggatctggtggtggaggtagtggtggaggaggttcaggtggaggtggttctggaggtggtggttctggtggcggaggttcaggaggtggaggttcagggggtggtggatcaggaggtggcggttctggtgggggaggatctggaggaggaggcagtggtggtggcggtagtggaggaggtggtagtggtggtgggggttcaggagggggtggttcaggaggaggcggatctggaggtggggggagtggcggaggaggtagtggcggagggggatcaggaggagggggatctggcggtggtgggtcactttcttgtcgacctccaatggtaaaacttgtatgtccagctgataatcttagagcagaaggccttgaatgtacaaaaacatgtcaaaattatgatcttgaatgtatgtctatgggttgtgtatcaggttgtctttgtccacctggaatggtacgacatgaaaatagatgtgtagcacttgaaagatgtccttgttttcatcaagggaaagaatatgctccaggggaaactgtaaaaatagggtgtaatacttgtgtatgcagggatagaaagtggaactgcaccgaccacgtgtgtgacgctacctgttccaccatcggcatggctcattacctgaccttcgacgggcttaaatacctgttccccggggagtgtcaatacgtgcttgtgcaagactactgcggctcaaacccagggacattcagaatcctcgtcggcaacaaggggtgttcccatccttccgttaagtgcaagaagagggtgaccatcctggtggaaggcggggaaatcgaacttttcgacggggaagttaacgtgaagcgcccaatgaaggacgagacccatttcgaggtggtcgaaagcgggagatacatcatcctgctgctcgggaaggctttgtccgttgtttgggacagacacctctccatctcagtggtcctcaagcagacctaccaggaaaaggtgtgcggcttgtgtgggaacttcgacggcatacagaacaacgacctcacctcatcaaatctccaggtcgaggaagaccctgtcgactttgggaacagctggaaggtgagcagccagtgcgcagataccagaaaggttccactcgacagcagcccagcaacttgtcataacaacatcatgaagcagaccatggtggacagcagctgcaggattctgaccagcgacgtctttcaggactgcaacaagctggtcgacccagagccatacctcgacgtttgcatttacgacacatgcagctgcgagagcattggggactgcgcatgcttttgcgacaccattgctgcttacgcccatgtgtgcgctcagcatgggaaggttgttacatggaggacagctacactgtgcccacagagctgcgaagaaagaaacctcagggagaacgggtacgaatgcgagtggaggtacaacagctgcgctccagcatgtcaggtaacttgccagcacccagaacctcttgcttgcccagttcaatgcgttgaagggtgccatgctcattgcccaccaggcaaaattctggacgaactgctccagacttgcgtcgatccagaagactgcccagtatgcgaggttgctggcaggaggtttgcaagtgggaaaaaggttacactcaacccaagcgacccagaacactgccagatatgccactgcgacgttgttaacctgacttgcgaggcatgccaggaacctggcggccttgttgttcctccaacagatgctccagttagcccaacaacattgtatgtggaggacattagcgagccccctttgcacgactttggcgggggaggcagtgggggcgggggcagtggcgggggcggctctggggggggcggctcagggggcggtggtagtggcggcgggggcgggagtttgtcttgtaggcctcctatggtaaaattggtttgtcctgctgataatttgagggctgaagggttggagtgtacaaaaacttgtcagaattatgatttggaatgcatgtctatgggctgtgttagtggctgtttgtgtcctcctggcatggtccggcatgaaaatcggtgtgtggctttggaacggtgtccctgttttcatcagggcaaagagtatgcccctggcgagacagtcaaaattggctgtaatacatgtgtgtgtcgggatcggaaatggaattgtacagatcatgtgtgtgatgccacttgttctactattggcatggcccactatttgacttttgacggcctgaagtatctgtttcccggcgagtgccagtatgtgctggtgcaggactattgcggcagcaaccctggcacatttcgcatactggtggggaataagggctgcagtcaccctagtgtgaagtgcaagaaacgcgtgactattctggtggaggggggcgaaattgagttgtttgacggcgaggtgaatgtgaagcggcctatgaaggatgagactcactttgaggtggtggagagcggccggtatattatactcctgctgggcaaagccctgagcgtcgtgtgggatcgccacttgtctattagcgtggtgttgaaacagacttatcaggagaaagtctgcgggctgtgcggcaattttgatgggattcagaataatgatctgactagcagcaatctgcaggtggaagaagatcccgtcgattttggcaatagttggaaagtgtcttctcagtgcgccgatacacggaaagtgcccctggatagtagtcccgccacatgccacaataatattatgaaacagacaatggtggatagttcttgccgcattctgacttctgatgtgtttcaggattgcaataaactggtcgatcccgagccctatctggatgtgtgcatatatgatacttgctcttgcgagtctattggcgattgcgcctgcttttgcgatacaattgccgcctatgcccacgtgtgcgcccagcacggcaaagtcgtcacttggcggactgccactctgtgcccccagtcttgcgaggagcgcaatctccgcgagaatggctatgagtgcgagtggcgctataattcttgcgcccccgcctgccaggtgacttgtcagcaccccgagcccctggcctgtcccgtgcagtgtgtggagggctgtcacgcccactgtccccccggcaaaattctcgatgagctgctgcagacatgtgtggaccccgaggattgtcccgtctgtgaggtggccggccggcgctttgcctctggcaaaaaagtcacactgaatccctctgatcccgagcactgtcagatatgtcattgtgatgtcgtcaatctcacttgtgaggcctgtcaggagcccggcggcctggtggtgcctcccacagatgcccccgtgtctcccacaactttgtatgtcgaggatatttctgagccccccctgcatgatttttgataa

SEQ ID NO: 64 - DNA, 8853 bp, Artificial Sequence
  D'D3/scFVIII-120
gcagaaggaacccgtgggagatcctccacagcacgttgttcccttttcggctccgacttcgtcaacaccttcgacggctccatgtactccttcgccggatactgctcatacctgctcgcaggagggtgccagaagcgttctttctccatcatcggagacttccagaacggaaagcgtgtctccctgtccgtctacctgggggaattcttcgacatccacctcttcgtcaacggaaccgtcacccagggagaccagcgtgtcagtatgccttacgcatccaagggactttacctggagaccgaggcaggatactacaagctcagcggagaggcatacggcttcgtcgcaagaatcgacggctccggcaacttccaggtgctgctctccgaccgttacttcaacaagacctgcggtctttgcggtaacttcaacatcttcgccgaggacgacttcatgacccaggagggcacccttacctcagacccatacgacttcgcaaacagctgggctctttcctccggagagcagtggtgtgagcgagcatctcctcctagttcttcctgtaacatctccagcggtgagatgcagaagggtctgtgggagcagtgtcagctcttgaagtcaacctccgtcttcgcacgatgccacccattggtcgatcctgagccattcgtagctctttgcgagaagaccctctgcgaatgcgcaggaggtcttgaatgcgcatgtccagcattgctcgagtacgcacgaacttgcgcacaagagggtatggtactctacggttggaccgaccattcagcatgctccccagtatgcccagcaggaatggaataccgacagtgtgtatccccatgtgctcgaacctgtcagtccctccacatcaacgagatgtgccaggagcgatgtgtcgacggttgttcatgccctgagggacaacttctcgacgagggtttgtgtgtcgagagtaccgagtgtccatgcgtacactcaggaaagcgatacccaccaggtacctccctttcaagagactgcaacacctgcatctgcaggaacagccagtggatctgctccaacgaggagtgccctggtgaatgtcttgtcaccggtcagtcacacttcaaaagcttcgacaaccgctacttcaccttctccggcatctgccagtacctgctcgctcgagactgccaggatcactcattctccatcgtgatcgagaccgtgcagtgcgctgatgacagagacgctgtctgtacccgatcagtaaccgtcagactgccaggtctccataactcccttgtcaagctcaagcacggtgctggtgtagctatggacggtcaggacgtacagctccctttgctcaagggagaccttagaatccagcacaccgtaaccgcttcagtgagactcagctacggtgaggaccttcagatggactgggacggtagaggtagactgctcgtcaagctctcaccagtatacgccggtaagacctgcggactttgcggtaattacaacgggaaccagggtgacgacttcctgaccccatcaggtcttgctgagcctagagtcgaagacttcggtaacgcttggaagctgcacggagactgccaagacctccagaagcagcactcagacccatgtgctttgaaccctagaatgaccaggtttagcgaggaggcctgcgctgtcttgacctccccaacttttgaggcttgccacagagctgtaagcccattgccatacctgagaaactgcaggtacgacgtctgcagctgtagcgacggtagggagtgtctttgcggagctttggcttcctacgctgcagcatgtgctggaaggggagttagggtagcttggagggaaccaggaaggtgtgaattgaactgcccaaagggacaggtctacttgcagtgcggaactccttgcaacttgacttgcaggtccctgagctacccagacgaggagtgtaacgaggcttgcttggagggatgtttttgcccaccaggattgtacatggacgagcggggagactgcgttccaaaggctcagtgtccatgctattatgacggcgagatctttcagcccgaggacatctttagcgaccaccacactatgtgctattgcgaggacggctttatgcactgcacaatgagcggggtgcctggcagcctgttgccagacgccgttttgagcagccctttgagccataggagcaagaggagcttgagctgcaggcctcctatggttaagttggtgtgccctgccgataacttgagggccgaaggattggagtgtacaaagacttgccagaactatgatctggagtgcatgagcatgggctgcgtgagcgggtgcctgtgccctcccggaatggttaggcatgaaaaccgctgtgttgccctggaacggtgtccttgttttcaccaaggaaaggagtatgcccctggagagacagttaagatcgggtgcaatacttgcgtgtgccgcgatcggaagtggaattgcacagatcacgtgtgcgatgccacatgcagcacaatcgggatggcccactatctgacatttgatggcctgaagtatctgtttcccggcgagtgccagtatgtgctggtgcaggattattgcggcagcaatcccgggacttttcggatactggtgggcaataagggctgcagtcaccccagcgtgaagtgcaagaagcgcgtgacaattctggtcgagggcggagagattgagctgtttgatggcgaggtgaatgtcaaacggcccatgaaagatgagactcactttgaggtggtggagagtgggcggtatataatactgcttcttgggaaagccctgagtgtggtgtgggatcgccatctgtctatatctgtggtgctgaaacagacttatcaggagaaagtgtgcgggctgtgcgggaattttgatggcattcagaataatgatctgactagtagtaatctgcaggtggaagaagatcccgtggattttggcaattcttggaaagtgtcttctcagtgtgccgacacacggaaagtgcccctggattcttctcccgccacttgtcataataatataatgaaacagactatggtggattctagttgtcgcattctgactagtgatgtgtttcaggattgtaataaactggttgatcccgagccctatctggatgtgtgtatttatgatacatgtagttgtgaaagtattggcgattgtgcctgtttttgtgatacaattgccgcctatgcccatgtgtgtgcccagcatggcaaagtggtgacatggcgcacagccacactctgtccccaaagctgtgaagaacgcaatctgcgggaaaatggctatgaatgtgaatggcgctataattcttgtgcccccgcctgtcaagtgacatgtcaacatcccgaacccctggcctgtcctgtgcaatgtgtggaaggctgtcatgctcattgtccccctgggaaaattctcgacgaactcctgcaaacatgtgttgatcccgaagattgtcccgtgtgtgaagtggccgggcgccgctttgccagtggcaaaaaagtgactctgaatcccagtgatcccgaacattgtcaaatttgtcattgtgatgtggtgaatctgacatgtgaagcttgtcaagaaccaggcgggctcgtggtgcctcccacagatgcccccgtgtctcccacaactctgtatgtggaagatatttctgaaccccctctgcatgattttggaggcggcggaagtggcggcggaggcagcggaggcggggggtctgggggtggtggatctggcgggggcgggagtggcggaggagggtctggcggcgggggcagcggcggtggtgggagtggaggcgggggctcagggggcgggggatcaggcgggggcggctcaggcggaggtggttcagggggtggtggcagtggggggggcgggtctgggggcggaggaagtgggggcggcgggtctggcggagggggatctggaggcggtggctctggtggagggggctctggcggtggtggctctgggggcggggggagtggcggcggtggctcaggcggtggtagtctcgttcctcggggctctgccacacggcggtattatctgggcgccgttgaactctcttgggattatatgcaatctgatctcggcgaactgcctgttgatgcccgctttcctcctcgggttcctaaatcttttccctttaatacatctgttgtttataaaaaaactctgtttgttgaatttactgatcatctgtttaatattgccaaaccccggcccccctggatgggcctgctgggccccacaattcaagccgaagtttatgatactgttgtgattactcttaagaacatggcttcccatcctgtcagtcttcatgctgttggtgtatcctactggaaagcttctgagggagctgaatatgatgatcagaccagtcaaagggagaaagaagatgataaagtcttccctggtggaagccatacatatgtctggcaggtcctgaaagagaatggtccaatggcctctgacccactgtgccttacctactcatatctttctcatgtggacctggtaaaagacttgaattcaggcctcattggagccctactagtatgtagagaagggagtctggccaaggaaaagacacagaccttgcacaaatttatactactttttgctgtatttgatgaagggaaaagttggcactcagaaacaaagaactccttgatgcaggatagggatgctgcatctgctcgggcctggcctaaaatgcacacagtcaatggttatgtaaacaggtctctgccaggtctgattggatgccacaggaaatcagtctattggcatgtgattggaatgggcaccactcctgaagtgcactcaatattcctcgaaggtcacacatttcttgtgaggaaccatcgccaggcgtccttggaaatctcgccaataactttccttactgctcaaacactcttgatggaccttggacagtttctactgttttgtcatatctcttcccaccaacatgatggcatggaagcttatgtcaaagtagacagctgtccagaggaaccccaactacgaatgaaaaataatgaagaagcggaagactatgatgatgatcttactgattctgaaatggatgtggtcaggtttgatgatgacaactctccttcctttatccaaattcgctcagttgccaagaagcatcctaaaacttgggtacattacattgctgctgaagaggaggactgggactatgctcccttagtcctcgcccccgatgacagaagttataaaagtcaatatttgaacaatggccctcagcggattggtaggaagtacaaaaaagtccgatttatggcatacacagatgaaacctttaagactcgtgaagctattcagcatgaatcaggaatcttgggacctttactttatggggaagttggagacacactgttgattatatttaagaatcaagcaagcagaccatataacatctaccctcacggaatcactgatgtccgtcctttgtattcaaggagattaccaaaaggtgtaaaacatttgaaggattttccaattctgccaggagaaatattcaaatataaatggacagtgactgtagaagatgggccaactaaatcagatcctcggtgcctgacccgctattactctagtttcgttaatatggagagagatctagcttcaggactcattggccctctcctcatctgctacaaagaatctgtagatcaaagaggaaaccagataatgtcagacaagaggaatgtcatcctgttttctgtatttgatgagaaccgaagctggtacctcacagagaatatacaacgctttctccccaatccagctggagtgcagcttgaggatccagagttccaagcctccaacatcatgcacagcatcaatggctatgtttttgatagtttgcagttgtcagtttgtttgcatgaggtggcatactggtacattctaagcattggagcacagactgacttcctttctgtcttcttctctggatataccttcaaacacaaaatggtctatgaagacacactcaccctattcccattctcaggagaaactgtcttcatgtcgatggaaaacccaggtctatggattctggggtgccacaactcagactttcggaacagaggcatgaccgccttactgaaggtttctagttgtgacaagaacactggtgattattacgaggacagttatgaagatatttcagcatacttgctgagtaaaaacaatgccattgaaccaagaagcttctcccagaattcaagacaccctagcactaggcaaaagcaatttaatgccaccacaattccagaaaatgacatagagaagactgacccttggtttgcacacagaacacctatgcctaaatgtcaaaatgtctcctctagtgatttgttgatgctcttgcgacagagtcctactccacatgggctatccttatctgatctccaagaagccaaatatgagactttttctgatgatccatcacctggagcaatagacagtaataacagcctgtctgaaatgacacacttcaggccacagctccatcacagtggggacatggtatttacccctgagtcaggcctccaattaagattaaatgagaaactggggacaactgcagcaacagagttgaagaaacttgatttcaaagtttctagtacatcaaataatctgatttcaacaattccatcagacaatttggcagcaggtactgataatacaagtactcttcagtcagatcaagaggaaattgactatgatgataccatatcagttgaaatgaagaaggaagattttgacatttatgatgaggatgaaaatcagagcccccgcagctttcaaaagaaaacacgacactattttattgctgcagtggagaggctctgggattatgggatgagtagctccccacatgttctaagaaacagggctcagagtggcagtgtccctcagttcaagaaagttgttttccaggaatttactgatggctcctttactcagcccttataccgtggagaactaaatgaacatttgggactcctggggccatatataagagcagaagttgaagataatatcatggtaactttcagaaatcaggcctctcgtccctattccttctattctagccttatttcttatgaggaagatcagaggcaaggagcagaacctagaaaaaactttgtcaagcctaatgaaaccaaaacttacttttggaaagtgcaacatcatatggcacccactaaagatgagtttgactgcaaagcctgggcttatttctctgatgttgacctggaaaaagatgtgcactcaggcctgattggaccccttctggtctgccacactaacacactgaaccctgctcatgggagacaagtgacagtacaggaatttgctctgtttttcaccatctttgatgagaccaaaagctggtacttcactgaaaatatggaaagaaactgcagggctccctgcaatatccagatggaagatcccacttttaaagagaattatcgcttccatgcaatcaatggctacataatggatacactacctggcttagtaatggctcaggatcaaaggattcgatggtatctgctcagcatgggcagcaatgaaaacatccattctattcatttcagtggacatgtgttcactgtacgaaaaaaagaggagtataaaatggcactgtacaatctctatccaggtgtttttgagacagtggaaatgttaccatccaaagctggaatttggcgggtggaatgccttattggcgagcatctacatgctgggatgagcacactttttctggtgtacagcaataagtgtcagactcccctgggaatggcttctggacacattagagattttcagattacagcttcaggacaatatggacagtgggccccaaagctggccagacttcattattccggatcaatcaatgcctggagcaccaaggagcccttttcttggatcaaggtggatctgttggcaccaatgattattcacggcatcaagacccagggtgcccgtcagaagttctccagcctctacatctctcagtttatcatcatgtatagtcttgatgggaagaagtggcagacttatcgaggaaattccactggaaccttaatggtcttctttggcaatgtggattcatctgggataaaacacaatatttttaaccctccaattattgctcgatacatccgtttgcacccaactcattatagcattcgcagcactcttcgcatggagttgatgggctgtgatttaaatagttgcagcatgccattgggaatggagagtaaagcaatatcagatgcacagattactgcttcatcctactttaccaatatgtttgccacctggtctccttcaaaagctcgacttcacctccaagggaggagtaatgcctggagacctcaggtgaataatccaaaagagtggctgcaagtggacttccagaagacaatgaaagtcacaggagtaactactcagggagtaaaatctctgcttaccagcatgtatgtgaaggagttcctcatctccagcagtcaagatggccatcagtggactctcttttttcagaatggcaaagtaaaggtttttcagggaaatcaagactccttcacacctgtggtgaactctctagacccaccgttactgactcgctaccttcgaattcacccccagagttgggtgcaccagattgccctgaggatggaggttctgggctgcgaggcacaggacctctactgataa

SEQ ID NO: 65 - DNA, 3750 bp, Artificial Sequence
  D'D3
gcagaaggaactcgcggcaggtcatccacggcccgatgcagccttttcggaagtgacttcgtcaacacctttgatgggagcatgtacagctttgcgggatactgcagttacctcctggcagggggctgccagaaacgctccttctcgattattggggacttccagaatggcaagagagtgagcctctccgtgtatcttggggaattttttgacatccatttgtttgtcaatggtaccgtgacacagggggaccaaagagtctccatgccctatgcctccaaagggctgtatctagaaactgaggctgggtactacaagctgtccggtgaggcctatggctttgtggccaggatcgatggcagcggcaactttcaagtcctgctgtcagacagatacttcaacaagacctgcgggctgtgtggcaactttaacatctttgctgaagatgactttatgacccaagaagggaccttgacctcggacccttatgactttgccaactcatgggctctgagcagtggagaacagtggtgtgaacgggcatctcctcccagcagctcatgcaacatctcctctggggaaatgcagaagggcctgtgggagcagtgccagcttctgaagagcacctcggtgtttgcccgctgccaccctctggtggaccccgagccttttgtggccctgtgtgagaagactttgtgtgagtgtgctggggggctggagtgcgcctgccctgccctcctggagtacgcccggacctgtgcccaggagggaatggtgctgtacggctggaccgaccacagcgcgtgcagcccagtgtgccctgctggtatggagtataggcagtgtgtgtccccttgcgccaggacctgccagagcctgcacatcaatgaaatgtgtcaggagcgatgcgtggatggctgcagctgccctgagggacagctcctggatgaaggcctctgcgtggagagcaccgagtgtccctgcgtgcattccggaaagcgctaccctcccggcacctccctctctcgagactgcaacacctgcatttgccgaaacagccagtggatctgcagcaatgaagaatgtccaggggagtgccttgtcacaggtcaatcacacttcaagagctttgacaacagatacttcaccttcagtgggatctgccagtacctgctggcccgggattgccaggaccactccttctccattgtcattgagactgtccagtgtgctgatgaccgcgacgctgtgtgcacccgctccgtcaccgtccggctgcctggcctgcacaacagccttgtgaaactgaagcatggggcaggagttgccatggatggccaggacgtccagctccccctcctgaaaggtgacctccgcatccagcatacagtgacggcctccgtgcgcctcagctacggggaggacctgcagatggactgggatggccgcgggaggctgctggtgaagctgtcccccgtctatgccgggaagacctgcggcctgtgtgggaattacaatggcaaccagggcgacgacttccttaccccctctgggctggcggagccccgggtggaggacttcgggaacgcctggaagctgcacggggactgccaggacctgcagaagcagcacagcgatccctgcgccctcaacccgcgcatgaccaggttctccgaggaggcgtgcgcggtcctgacgtcccccacattcgaggcctgccatcgtgccgtcagcccgctgccctacctgcggaactgccgctacgacgtgtgctcctgctcggacggccgcgagtgcctgtgcggcgccctggccagctatgccgcggcctgcgcggggagaggcgtgcgcgtcgcgtggcgcgagccaggccgctgtgagctgaactgcccgaaaggccaggtgtacctgcagtgcgggaccccctgcaacctgacctgccgctctctctcttacccggatgaggaatgcaatgaggcctgcctggagggctgcttctgccccccagggctctacatggatgagaggggggactgcgtgcccaaggcccagtgcccctgttactatgacggtgagatcttccagccagaagacatcttctcagaccatcacaccatgtgctactgtgaggatggcttcatgcactgtaccatgagtggagtccccggaagcttgctgcctgacgctgtcctcagcagtcccctgtctcatcgcagcaaaaggagcctatcctgtcggccccccatggtcaagctggtgtgtcccgctgacaacctgcgggctgaagggctcgagtgtaccaaaacgtgccagaactatgacctggagtgcatgagcatgggctgtgtctctggctgcctctgccccccgggcatggtccggcatgagaacagatgtgtggccctggaaaggtgtccctgcttccatcagggcaaggagtatgcccctggagaaacagtgaagattggctgcaacacttgtgtctgtcgggaccggaagtggaactgcacagaccatgtgtgtgatgccacgtgctccacgatcggcatggcccactacctcaccttcgacgggctcaaatacctgttccccggggagtgccagtacgttctggtgcaggattactgcggcagtaaccctgggacctttcggatcctagtggggaataagggatgcagccacccctcagtgaaatgcaagaaacgggtcaccatcctggtggagggaggagagattgagctgtttgacggggaggtgaatgtgaagaggcccatgaaggatgagactcactttgaggtggtggagtctggccggtacatcattctgctgctgggcaaagccctctccgtggtctgggaccgccacctgagcatctccgtggtcctgaagcagacataccaggagaaagtgtgtggcctgtgtgggaattttgatggcatccagaacaatgacctcaccagcagcaacctccaagtggaggaagaccctgtggactttgggaactcctggaaagtgagctcgcagtgtgctgacaccagaaaagtgcctctggactcatcccctgccacctgccataacaacatcatgaagcagacgatggtggattcctcctgtagaatccttaccagtgacgtcttccaggactgcaacaagctggtggaccccgagccatatctggatgtctgcatttacgacacctgctcctgtgagtccattggggactgcgcctgcttctgcgacaccattgctgcctatgcccacgtgtgtgcccagcatggcaaggtggtgacctggaggacggccacattgtgcccccagagctgcgaggagaggaatctccgggagaacgggtatgagtgtgagtggcgctataacagctgtgcacctgcctgtcaagtcacgtgtcagcaccctgagccactggcctgccctgtgcagtgtgtggagggctgccatgcccactgccctccagggaaaatcctggatgagcttttgcagacctgcgttgaccctgaagactgtccagtgtgtgaggtggctggccggcgttttgcctcaggaaagaaagtcaccttgaatcccagtgaccctgagcactgccagatttgccactgtgatgttgtcaacctcacctgtgaagcctgccaggagccgggaggcctggtggtgcctcccacagatgccccggtgagccccaccactctgtatgtggaggacatctcggaaccgccgttgcacgatttctgataa

SEQ ID NO: 66 - DNA, 7401 bp, Artificial Sequence
  scFVIII/D'D3/Fc-120
gccaccagaagatactacctgggtgcagtggaactgtcatgggactatatgcaaagtgatctcggtgagctgcctgtggacgcaagatttcctcctagagtgccaaaatcttttccattcaacacctcagtcgtgtacaaaaagactctgtttgtagaattcacggatcaccttttcaacatcgctaagccaaggccaccctggatgggtctgctaggtcctaccatccaggctgaggtttatgatacagtggtcattacacttaagaacatggcttcccatcctgtcagtcttcatgctgttggtgtatcctactggaaagcttctgagggagctgaatatgatgatcagaccagtcaaagggagaaagaagatgataaagtcttccctggtggaagccatacatatgtctggcaggtcctgaaagagaatggtccaatggcctctgacccactgtgccttacctactcatatctttctcatgtggacctggtaaaagacttgaattcaggcctcattggagccctactagtatgtagagaagggagtctggccaaggaaaagacacagaccttgcacaaatttatactactttttgctgtatttgatgaagggaaaagttggcactcagaaacaaagaactccttgatgcaggatagggatgctgcatctgctcgggcctggcctaaaatgcacacagtcaatggttatgtaaacaggtctctgccaggtctgattggatgccacaggaaatcagtctattggcatgtgattggaatgggcaccactcctgaagtgcactcaatattcctcgaaggtcacacatttcttgtgaggaaccatcgccaggcgtccttggaaatctcgccaataactttccttactgctcaaacactcttgatggaccttggacagtttctactgttttgtcatatctcttcccaccaacatgatggcatggaagcttatgtcaaagtagacagctgtccagaggaaccccaactacgaatgaaaaataatgaagaagcggaagactatgatgatgatcttactgattctgaaatggatgtggtcaggtttgatgatgacaactctccttcctttatccaaattcgctcagttgccaagaagcatcctaaaacttgggtacattacattgctgctgaagaggaggactgggactatgctcccttagtcctcgcccccgatgacagaagttataaaagtcaatatttgaacaatggccctcagcggattggtaggaagtacaaaaaagtccgatttatggcatacacagatgaaacctttaagactcgtgaagctattcagcatgaatcaggaatcttgggacctttactttatggggaagttggagacacactgttgattatatttaagaatcaagcaagcagaccatataacatctaccctcacggaatcactgatgtccgtcctttgtattcaaggagattaccaaaaggtgtaaaacatttgaaggattttccaattctgccaggagaaatattcaaatataaatggacagtgactgtagaagatgggccaactaaatcagatcctcggtgcctgacccgctattactctagtttcgttaatatggagagagatctagcttcaggactcattggccctctcctcatctgctacaaagaatctgtagatcaaagaggaaaccagataatgtcagacaagaggaatgtcatcctgttttctgtatttgatgagaaccgaagctggtacctcacagagaatatacaacgctttctccccaatccagctggagtgcagcttgaggatccagagttccaagcctccaacatcatgcacagcatcaatggctatgtttttgatagtttgcagttgtcagtttgtttgcatgaggtggcatactggtacattctaagcattggagcacagactgacttcctttctgtcttcttctctggatataccttcaaacacaaaatggtctatgaagacacactcaccctattcccattctcaggagaaactgtcttcatgtcgatggaaaacccaggtctatggattctggggtgccacaactcagactttcggaacagaggcatgaccgccttactgaaggtttctagttgtgacaagaacactggtgattattacgaggacagttatgaagatatttcagcatacttgctgagtaaaaacaatgccattgaaccaagaagcttctcccagaattcaagacaccctagcactaggcaaaagcaatttaatgccaccacaattccagaaaatgacatagagaagactgacccttggtttgcacacagaacacctatgcctaaatgtcaaaatgtctcctctagtgatttgttgatgctcttgcgacagagtcctactccacatgggctatccttatctgatctccaagaagccaaatatgagactttttctgatgatccatcacctggagcaatagacagtaataacagcctgtctgaaatgacacacttcaggccacagctccatcacagtggggacatggtatttacccctgagtcaggcctccaattaagattaaatgagaaactggggacaactgcagcaacagagttgaagaaacttgatttcaaagtttctagtacatcaaataatctgatttcaacaattccatcagacaatttggcagcaggtactgataatacaagtactcttcagtcagatcaagaggaaattgactatgatgataccatatcagttgaaatgaagaaggaagattttgacatttatgatgaggatgaaaatcagagcccccgcagctttcaaaagaaaacacgacactattttattgctgcagtggagaggctctgggattatgggatgagtagctccccacatgttctaagaaacagggctcagagtggcagtgtccctcagttcaagaaagttgttttccaggaatttactgatggctcctttactcagcccttataccgtggagaactaaatgaacatttgggactcctggggccatatataagagcagaagttgaagataatatcatggtaactttcagaaatcaggcctctcgtccctattccttctattctagccttatttcttatgaggaagatcagaggcaaggagcagaacctagaaaaaactttgtcaagcctaatgaaaccaaaacttacttttggaaagtgcaacatcatatggcacccactaaagatgagtttgactgcaaagcctgggcttatttctctgatgttgacctggaaaaagatgtgcactcaggcctgattggaccccttctggtctgccacactaacacactgaaccctgctcatgggagacaagtgacagtacaggaatttgctctgtttttcaccatctttgatgagaccaaaagctggtacttcactgaaaatatggaaagaaactgcagggctccctgcaatatccagatggaagatcccacttttaaagagaattatcgcttccatgcaatcaatggctacataatggatacactacctggcttagtaatggctcaggatcaaaggattcgatggtatctgctcagcatgggcagcaatgaaaacatccattctattcatttcagtggacatgtgttcactgtacgaaaaaaagaggagtataaaatggcactgtacaatctctatccaggtgtttttgagacagtggaaatgttaccatccaaagctggaatttggcgggtggaatgccttattggcgagcatctacatgctgggatgagcacactttttctggtgtacagcaataagtgtcagactcccctgggaatggcttctggacacattagagattttcagattacagcttcaggacaatatggacagtgggccccaaagctggccagacttcattattccggatctatcaacgcatggagcaccaaggagccattctcctggatcaaggtggacctcctcgctcctatgatcatccacggcatcaagacccagggcgctagacagaagttcagcagcctctacatctcccagttcatcatcatgtactccctggacggcaagaagtggcagacctaccgcggaaactccaccggaaccctcatggtcttcttcggaaacgtggacagctccggtatcaagcacaacatcttcaacccccctatcatcgcacgttacatccgtctgcaccctacccactactccatcaggagcaccctcagaatggagctgatgggttgcgacctcaactcctgctccatgccactcggaatggagtcaaaggcaatctccgacgcacaaatcaccgcatcctcctacttcaccaacatgttcgccacctggtcaccaagtaaggcaaggctccacctccaaggacgttcaaacgcatggcgtccacaagtcaacaacccaaaggagtggctccaagtggacttccagaagacaatgaaggtgaccggcgtgaccacccaaggagtcaagtcactgctcacctccatgtacgtcaaggagttcctgatctccagctcccaagacggccaccaatggacccttttcttccagaacggcaaggtgaaggtcttccagggtaaccaggactccttcaccccagtcgtcaactccctcgatccaccacttcttaccagatacctccgaatccaccctcaaagctgggtccaccaaatcgcacttcgaatggaggtcctgggatgcgaagcacaagatctgtacctggtcccacgtggaagtggtggtgggggaagtggtggaggtggtagtggaggtggaggatctggtggtggaggttcaggtggagggggaagtggaggtggtgggtctggtggaggaggtagtggtggcggaggttctggaggtgggggatcaggtggtggaggatcaggaggaggtggatcaggtgggggaggatcaggcggaggtggttctggagggggtgggagtggaggaggcggatcaggaggcggtggctcaggaggaggcggctcaggaggcggaggatctgggggagggggctcaggaggtgggggttcagggggcggtggttctgggggcggggggtctggcggcggaggctctctttcatgtcgaccacctatggttaaacttgtatgtcctgcagataatcttagagctgaagggcttgaatgtacaaaaacttgtcaaaattatgatcttgaatgtatgtcaatggggtgtgttagtgggtgtctttgtcctcctgggatggttagacatgaaaatcgatgtgtagctttggaaagatgtccatgttttcatcaaggcaaagaatatgcaccaggcgaaacagtaaaaattgggtgtaatacatgtgtatgtcgagatcgaaaatggaattgtactgatcatgtttgtgatgcaacctgtagtaccatcggcatggctcactaccttaccttcgacgggttgaagtacctgttccctggggaatgccagtacgtactcgtccaggattactgcgggtctaaccctgggacatttagaattctggtcggcaacaagggctgctcccacccaagtgtcaagtgcaagaagagggtcaccattctggtcgagggcggcgaaatagaactgttcgacggggaagtaaacgtgaagaggccaatgaaggacgagacccacttcgaggtggtggaatccgggagatacattattctgctcctcgggaaggccctgagtgtcgtatgggacaggcacctttccattagcgtcgtcctcaagcagacctaccaggaaaaggtctgcggcctttgtgggaactttgacggcatacagaacaacgacctgacctccagcaacctgcaggtagaggaagacccagtagactttgggaacagctggaaggtctcctcccagtgtgctgacaccaggaaggtccctcttgactctagtccagctacctgtcacaacaacattatgaagcagaccatggtggacagcagctgccggattctcacttccgacgtgtttcaggactgcaacaagctggttgaccctgagccctacctggacgtgtgtatttacgacacatgctcctgcgagagcattggcgactgcgcttgcttttgcgacacaatagccgcctatgcccacgtgtgtgctcagcacggcaaagtggtgacttggaggacagctacactgtgtcctcagagttgtgaggagaggaacctgcgggaaaatggctatgagtgcgaatggcggtataatagctgcgccccagcttgtcaggtgacttgtcagcacccagaaccactggcttgtcctgtgcagtgtgttgaaggctgccatgctcattgcccaccaggcaaaattctggacgaactgctgcagacatgcgttgatcctgaggattgccctgtatgcgaagtggctggccggcggtttgcttctggcaaaaaagttactctgaatccctccgatcctgagcactgccagatatgccattgcgatgtggtgaatctgacttgcgaggcctgccaggaacctgggggcttggttgttcctcctacagatgcccctgttagtcctactactctgtatgtggaggatattagcgagccccctctgcatgattttggcggtggggggtcaggcggaggcggcagtggcggcgggggctctggcggaggtgggtccggcggtggcggttctggcgggggcggctctgacaaaactcacacatgcccaccgtgcccagcacctgaactccttgggggaccgtcagtcttcctcttccccccaaaacccaaggacaccctcatgatctcccggacccctgaggtcacatgcgtggtggtggacgtgagccacgaagaccctgaggtcaagttcaactggtacgtggacggcgtggaggtgcataatgccaagacaaagccgcgggaggagcagtacaacagcacgtaccgtgtggtcagcgtcctcaccgtcctgcaccaggactggctgaatggcaaggagtacaagtgcaaggtctccaacaaagccctcccagcccccatcgagaaaaccatctccaaagccaaagggcagccccgagaaccacaggtgtacaccctgcccccatcccgggatgagctgaccaagaaccaggtcagcctgacctgcctggtcaaaggcttctatcccagcgacatcgccgtggagtgggagagcaatgggcagccggagaacaactacaagaccacgcctcccgtgctggactccgacggctccttcttcctctacagcaagctcaccgtggacaagagcaggtggcagcaggggaacgtcttctcatgctccgtgatgcatgaggctctgcacaaccactacacgcagaagagcctctccctgtctccgggtaaatgataa

SEQ ID NO: 67 - DNA, 687 bp, Artificial Sequence
  Fc
gacaaaactcacacatgcccaccgtgcccagcacctgaactccttgggggaccgtcagtcttcctcttccccccaaaacccaaggacaccctcatgatctcccggacccctgaggtcacatgcgtggtggtggacgtgagccacgaagaccctgaggtcaagttcaactggtacgtggacggcgtggaggtgcataatgccaagacaaagccgcgggaggagcagtacaacagcacgtaccgtgtggtcagcgtcctcaccgtcctgcaccaggactggctgaatggcaaggagtacaagtgcaaggtctccaacaaagccctcccagcccccatcgagaaaaccatctccaaagccaaagggcagccccgagaaccacaggtgtacaccctgcccccatcccgggatgagctgaccaagaaccaggtcagcctgacctgcctggtcaaaggcttctatcccagcgacatcgccgtggagtgggagagcaatgggcagccggagaacaactacaagaccacgcctcccgtgctggactccgacggctccttcttcctctacagcaagctcaccgtggacaagagcaggtggcagcaggggaacgtcttctcatgctccgtgatgcatgaggctctgcacaaccactacacgcagaagagcctctccctgtctccgggtaaatagtaa

SEQ ID NO: 68 - DNA, 5946 bp, Artificial Sequence
  dcFVIII/D'D3/D'D3-HC Heavy chain
gccaccagaagatactacctgggtgcagtggaactgtcatgggactatatgcaaagtgatctcggtgagctgcctgtggacgcaagatttcctcctagagtgccaaaatcttttccattcaacacctcagtcgtgtacaaaaagactctgtttgtagaattcacggatcaccttttcaacatcgctaagccaaggccaccctggatgggtctgctaggtcctaccatccaggctgaggtttatgatacagtggtcattacacttaagaacatggcttcccatcctgtcagtcttcatgctgttggtgtatcctactggaaagcttctgagggagctgaatatgatgatcagaccagtcaaagggagaaagaagatgataaagtcttccctggtggaagccatacatatgtctggcaggtcctgaaagagaatggtccaatggcctctgacccactgtgccttacctactcatatctttctcatgtggacctggtaaaagacttgaattcaggcctcattggagccctactagtatgtagagaagggagtctggccaaggaaaagacacagaccttgcacaaatttatactactttttgctgtatttgatgaagggaaaagttggcactcagaaacaaagaactccttgatgcaggatagggatgctgcatctgctcgggcctggcctaaaatgcacacagtcaatggttatgtaaacaggtctctgccaggtctgattggatgccacaggaaatcagtctattggcatgtgattggaatgggcaccactcctgaagtgcactcaatattcctcgaaggtcacacatttcttgtgaggaaccatcgccaggcgtccttggaaatctcgccaataactttccttactgctcaaacactcttgatggaccttggacagtttctactgttttgtcatatctcttcccaccaacatgatggcatggaagcttatgtcaaagtagacagctgtccagaggaaccccaactacgaatgaaaaataatgaagaagcggaagactatgatgatgatcttactgattctgaaatggatgtggtcaggtttgatgatgacaactctccttcctttatccaaattcgctcagttgccaagaagcatcctaaaacttgggtacattacattgctgctgaagaggaggactgggactatgctcccttagtcctcgcccccgatgacagaagttataaaagtcaatatttgaacaatggccctcagcggattggtaggaagtacaaaaaagtccgatttatggcatacacagatgaaacctttaagactcgtgaagctattcagcatgaatcaggaatcttgggacctttactttatggggaagttggagacacactgttgattatatttaagaatcaagcaagcagaccatataacatctaccctcacggaatcactgatgtccgtcctttgtattcaaggagattaccaaaaggtgtaaaacatttgaaggattttccaattctgccaggagaaatattcaaatataaatggacagtgactgtagaagatgggccaactaaatcagatcctcggtgcctgacccgctattactctagtttcgttaatatggagagagatctagcttcaggactcattggccctctcctcatctgctacaaagaatctgtagatcaaagaggaaaccagataatgtcagacaagaggaatgtcatcctgttttctgtatttgatgagaaccgaagctggtacctcacagagaatatacaacgctttctccccaatccagctggagtgcagcttgaggatccagagttccaagcctccaacatcatgcacagcatcaatggctatgtttttgatagtttgcagttgtcagtttgtttgcatgaggtggcatactggtacattctaagcattggagcacagactgacttcctttctgtcttcttctctggatataccttcaaacacaaaatggtctatgaagacacactcaccctattcccattctcaggagaaactgtcttcatgtcgatggaaaacccaggtctatggattctggggtgccacaactcagactttcggaacagaggcatgaccgccttactgaaggtttctagttgtgacaagaacactggtgattattacgaggacagttatgaagatatttcagcatacttgctgagtaaaaacaatgccattgaaccaagaagcttctcccagaattcaagacaccctagcactaggcaaaagcaatttaatgccaccacaattccagaaaatgacatagagaagactgacccttggtttgcacacagaacacctatgcctaaatgtcaaaatgtctcctctagtgatttgttgatgctcttgcgacagagtcctactccacatgggctatccttatctgatctccaagaagccaaatatgagactttttctgatgatccatcacctggagcaatagacagtaataacagcctgtctgaaatgacacacttcaggccacagctccatcacagtggggacatggtatttacccctgagtcaggcctccaattaagattaaatgagaaactggggacaactgcagcaacagagttgaagaaacttgatttcaaagtttctagtacatcaaataatctgatttcaacaattccatcagacaatttggcagcaggtactgataatacaagttccttaggacccccaagtatgccagttcattatgatagtcaattagataccactctatttggcaaaaagtcatctccccttactgagtctggtggacctctgagcctatcctgtcggccccccatggtcaagctggtgtgtcccgctgacaacctgcgggctgaagggctcgagtgtaccaaaacgtgccagaactatgacctggagtgcatgagcatgggctgtgtctctggctgcctctgccccccgggcatggtccggcatgagaacagatgtgtggccctggaaaggtgtccctgcttccatcagggcaaggagtatgcccctggagaaacagtgaagattggctgcaacacttgtgtctgtcgggaccggaagtggaactgcacagaccatgtgtgtgatgccacgtgctccacgatcggcatggcccactacctcaccttcgacgggctcaaatacctgttccccggggagtgccagtacgttctggtgcaggattactgcggcagtaaccctgggacctttcggatcctagtggggaataagggatgcagccacccctcagtgaaatgcaagaaacgggtcaccatcctggtggagggaggagagattgagctgtttgacggggaggtgaatgtgaagaggcccatgaaggatgagactcactttgaggtggtggagtctggccggtacatcattctgctgctgggcaaagccctctccgtggtctgggaccgccacctgagcatctccgtggtcctgaagcagacataccaggagaaagtgtgtggcctgtgtgggaattttgatggcatccagaacaatgacctcaccagcagcaacctccaagtggaggaagaccctgtggactttgggaactcctggaaagtgagctcgcagtgtgctgacaccagaaaagtgcctctggactcatcccctgccacctgccataacaacatcatgaagcagacgatggtggattcctcctgtagaatccttaccagtgacgtcttccaggactgcaacaagctggtggaccccgagccatatctggatgtctgcatttacgacacctgctcctgtgagtccattggggactgcgcctgcttctgcgacaccattgctgcctatgcccacgtgtgtgcccagcatggcaaggtggtgacctggaggacggccacattgtgcccccagagctgcgaggagaggaatctccgggagaacgggtatgagtgtgagtggcgctataacagctgtgcacctgcctgtcaagtcacgtgtcagcaccctgagccactggcctgccctgtgcagtgtgtggagggctgccatgcccactgccctccagggaaaatcctggatgagcttttgcagacctgcgttgaccctgaagactgtccagtgtgtgaggtggctggccggcgttttgcctcaggaaagaaagtcaccttgaatcccagtgaccctgagcactgccagatttgccactgtgatgttgtcaacctcacctgtgaagcctgccaggagccgggaggcctggtggtgcctcccacagatgccccggtgagccccaccactctgtatgtggaggacatctcggaaccgccgttgcacgatttcggcggtggggggtcaggcggaggcggcagtggcggcgggggctctggcggaggtgggtccggcggtggcggttctggcgggggcggcggcagcctatcctgtcggccccccatggtcaagctggtgtgtcccgctgacaacctgcgggctgaagggctcgagtgtaccaaaacgtgccagaactatgacctggagtgcatgagcatgggctgtgtctctggctgcctctgccccccgggcatggtccggcatgagaacagatgtgtggccctggaaaggtgtccctgcttccatcagggcaaggagtatgcccctggagaaacagtgaagattggctgcaacacttgtgtctgtcgggaccggaagtggaactgcacagaccatgtgtgtgatgccacgtgctccacgatcggcatggcccactacctcaccttcgacgggctcaaatacctgttccccggggagtgccagtacgttctggtgcaggattactgcggcagtaaccctgggacctttcggatcctagtggggaataagggatgcagccacccctcagtgaaatgcaagaaacgggtcaccatcctggtggagggaggagagattgagctgtttgacggggaggtgaatgtgaagaggcccatgaaggatgagactcactttgaggtggtggagtctggccggtacatcattctgctgctgggcaaagccctctccgtggtctgggaccgccacctgagcatctccgtggtcctgaagcagacataccaggagaaagtgtgtggcctgtgtgggaattttgatggcatccagaacaatgacctcaccagcagcaacctccaagtggaggaagaccctgtggactttgggaactcctggaaagtgagctcgcagtgtgctgacaccagaaaagtgcctctggactcatcccctgccacctgccataacaacatcatgaagcagacgatggtggattcctcctgtagaatccttaccagtgacgtcttccaggactgcaacaagctggtggaccccgagccatatctggatgtctgcatttacgacacctgctcctgtgagtccattggggactgcgcctgcttctgcgacaccattgctgcctatgcccacgtgtgtgcccagcatggcaaggtggtgacctggaggacggccacattgtgcccccagagctgcgaggagaggaatctccgggagaacgggtatgagtgtgagtggcgctataacagctgtgcacctgcctgtcaagtcacgtgtcagcaccctgagccactggcctgccctgtgcagtgtgtggagggctgccatgcccactgccctccagggaaaatcctggatgagcttttgcagacctgcgttgaccctgaagactgtccagtgtgtgaggtggctggccggcgttttgcctcaggaaagaaagtcaccttgaatcccagtgaccctgagcactgccagatttgccactgtgatgttgtcaacctcacctgtgaagcctgccaggagccgggaggcctggtggtgcctcccacagatgccccggtgagccccaccactctgtatgtggaggacatctcggaaccgccgttgcacgatttctgataa

SEQ ID NO: 69 - DNA, 2322 bp, Artificial Sequence; identical to SEQ ID NO: 47
  dcFVIII/D'D3/D'D3-HC Light chain

SEQ ID NO: 70 - DNA, 8172 bp, Artificial Sequence
  scFVIII/D'D3/Fc/Fc-120
gccaccagaagatactacctgggtgcagtggaactgtcatgggactatatgcaaagtgatctcggtgagctgcctgtggacgcaagatttcctcctagagtgccaaaatcttttccattcaacacctcagtcgtgtacaaaaagactctgtttgtagaattcacggatcaccttttcaacatcgctaagccaaggccaccctggatgggtctgctaggtcctaccatccaggctgaggtttatgatacagtggtcattacacttaagaacatggcttcccatcctgtcagtcttcatgctgttggtgtatcctactggaaagcttctgagggagctgaatatgatgatcagaccagtcaaagggagaaagaagatgataaagtcttccctggtggaagccatacatatgtctggcaggtcctgaaagagaatggtccaatggcctctgacccactgtgccttacctactcatatctttctcatgtggacctggtaaaagacttgaattcaggcctcattggagccctactagtatgtagagaagggagtctggccaaggaaaagacacagaccttgcacaaatttatactactttttgctgtatttgatgaagggaaaagttggcactcagaaacaaagaactccttgatgcaggatagggatgctgcatctgctcgggcctggcctaaaatgcacacagtcaatggttatgtaaacaggtctctgccaggtctgattggatgccacaggaaatcagtctattggcatgtgattggaatgggcaccactcctgaagtgcactcaatattcctcgaaggtcacacatttcttgtgaggaaccatcgccaggcgtccttggaaatctcgccaataactttccttactgctcaaacactcttgatggaccttggacagtttctactgttttgtcatatctcttcccaccaacatgatggcatggaagcttatgtcaaagtagacagctgtccagaggaaccccaactacgaatgaaaaataatgaagaagcggaagactatgatgatgatcttactgattctgaaatggatgtggtcaggtttgatgatgacaactctccttcctttatccaaattcgctcagttgccaagaagcatcctaaaacttgggtacattacattgctgctgaagaggaggactgggactatgctcccttagtcctcgcccccgatgacagaagttataaaagtcaatatttgaacaatggccctcagcggattggtaggaagtacaaaaaagtccgatttatggcatacacagatgaaacctttaagactcgtgaagctattcagcatgaatcaggaatcttgggacctttactttatggggaagttggagacacactgttgattatatttaagaatcaagcaagcagaccatataacatctaccctcacggaatcactgatgtccgtcctttgtattcaaggagattaccaaaaggtgtaaaacatttgaaggattttccaattctgccaggagaaatattcaaatataaatggacagtgactgtagaagatgggccaactaaatcagatcctcggtgcctgacccgctattactctagtttcgttaatatggagagagatctagcttcaggactcattggccctctcctcatctgctacaaagaatctgtagatcaaagaggaaaccagataatgtcagacaagaggaatgtcatcctgttttctgtatttgatgagaaccgaagctggtacctcacagagaatatacaacgctttctccccaatccagctggagtgcagcttgaggatccagagttccaagcctccaacatcatgcacagcatcaatggctatgtttttgatagtttgcagttgtcagtttgtttgcatgaggtggcatactggtacattctaagcattggagcacagactgacttcctttctgtcttcttctctggatataccttcaaacacaaaatggtctatgaagacacactcaccctattcccattctcaggagaaactgtcttcatgtcgatggaaaacccaggtctatggattctggggtgccacaactcagactttcggaacagaggcatgaccgccttactgaaggtttctagttgtgacaagaacactggtgattattacgaggacagttatgaagatatttcagcatacttgctgagtaaaaacaatgccattgaaccaagaagcttctcccagaattcaagacaccctagcactaggcaaaagcaatttaatgccaccacaattccagaaaatgacatagagaagactgacccttggtttgcacacagaacacctatgcctaaatgtcaaaatgtctcctctagtgatttgttgatgctcttgcgacagagtcctactccacatgggctatccttatctgatctccaagaagccaaatatgagactttttctgatgatccatcacctggagcaatagacagtaataacagcctgtctgaaatgacacacttcaggccacagctccatcacagtggggacatggtatttacccctgagtcaggcctccaattaagattaaatgagaaactggggacaactgcagcaacagagttgaagaaacttgatttcaaagtttctagtacatcaaataatctgatttcaacaattccatcagacaatttggcagcaggtactgataatacaagtactcttcagtcagatcaagaggaaattgactatgatgataccatatcagttgaaatgaagaaggaagattttgacatttatgatgaggatgaaaatcagagcccccgcagctttcaaaagaaaacacgacactattttattgctgcagtggagaggctctgggattatgggatgagtagctccccacatgttctaagaaacagggctcagagtggcagtgtccctcagttcaagaaagttgttttccaggaatttactgatggctcctttactcagcccttataccgtggagaactaaatgaacatttgggactcctggggccatatataagagcagaagttgaagataatatcatggtaactttcagaaatcaggcctctcgtccctattccttctattctagccttatttcttatgaggaagatcagaggcaaggagcagaacctagaaaaaactttgtcaagcctaatgaaaccaaaacttacttttggaaagtgcaacatcatatggcacccactaaagatgagtttgactgcaaagcctgggcttatttctctgatgttgacctggaaaaagatgtgcactcaggcctgattggaccccttctggtctgccacactaacacactgaaccctgctcatgggagacaagtgacagtacaggaatttgctctgtttttcaccatctttgatgagaccaaaagctggtacttcactgaaaatatggaaagaaactgcagggctccctgcaatatccagatggaagatcccacttttaaagagaattatcgcttccatgcaatcaatggctacataatggatacactacctggcttagtaatggctcaggatcaaaggattcgatggtatctgctcagcatgggcagcaatgaaaacatccattctattcatttcagtggacatgtgttcactgtacgaaaaaaagaggagtataaaatggcactgtacaatctctatccaggtgtttttgagacagtggaaatgttaccatccaaagctggaatttggcgggtggaatgccttattggcgagcatctacatgctgggatgagcacactttttctggtgtacagcaataagtgtcagactcccctgggaatggcttctggacacattagagattttcagattacagcttcaggacaatatggacagtgggccccaaagctggccagacttcattattccggatctatcaacgcatggagcaccaaggagccattctcctggatcaaggtggacctcctcgctcctatgatcatccacggcatcaagacccagggcgctagacagaagttcagcagcctctacatctcccagttcatcatcatgtactccctggacggcaagaagtggcagacctaccgcggaaactccaccggaaccctcatggtcttcttcggaaacgtggacagctccggtatcaagcacaacatcttcaacccccctatcatcgcacgttacatccgtctgcaccctacccactactccatcaggagcaccctcagaatggagctgatgggttgcgacctcaactcctgctccatgccactcggaatggagtcaaaggcaatctccgacgcacaaatcaccgcatcctcctacttcaccaacatgttcgccacctggtcaccaagtaaggcaaggctccacctccaaggacgttcaaacgcatggcgtccacaagtcaacaacccaaaggagtggctccaagtggacttccagaagacaatgaaggtgaccggcgtgaccacccaaggagtcaagtcactgctcacctccatgtacgtcaaggagttcctgatctccagctcccaagacggccaccaatggacccttttcttccagaacggcaaggtgaaggtcttccagggtaaccaggactccttcaccccagtcgtcaactccctcgatccaccacttcttaccagatacctccgaatccaccctcaaagctgggtccaccaaatcgcacttcgaatggaggtcctgggatgcgaagcacaagatctgtacctggtcccacgtggaagtggtggtgggggaagtggtggaggtggtagtggaggtggaggatctggtggtggaggttcaggtggagggggaagtggaggtggtgggtctggtggaggaggtagtggtggcggaggttctggaggtgggggatcaggtggtggaggatcaggaggaggtggatcaggtgggggaggatcaggcggaggtggttctggagggggtgggagtggaggaggcggatcaggaggcggtggctcaggaggaggcggctcaggaggcggaggatctgggggagggggctcaggaggtgggggttcagggggcggtggttctgggggcggggggtctggcggcggaggctctctttcatgtcgaccacctatggttaaacttgtatgtcctgcagataatcttagagctgaagggcttgaatgtacaaaaacttgtcaaaattatgatcttgaatgtatgtcaatggggtgtgttagtgggtgtctttgtcctcctgggatggttagacatgaaaatcgatgtgtagctttggaaagatgtccatgttttcatcaaggcaaagaatatgcaccaggcgaaacagtaaaaattgggtgtaatacatgtgtatgtcgagatcgaaaatggaattgtactgatcatgtttgtgatgcaacctgtagtaccatcggcatggctcactaccttaccttcgacgggttgaagtacctgttccctggggaatgccagtacgtactcgtccaggattactgcgggtctaaccctgggacatttagaattctggtcggcaacaagggctgctcccacccaagtgtcaagtgcaagaagagggtcaccattctggtcgagggcggcgaaatagaactgttcgacggggaagtaaacgtgaagaggccaatgaaggacgagacccacttcgaggtggtggaatccgggagatacattattctgctcctcgggaaggccctgagtgtcgtatgggacaggcacctttccattagcgtcgtcctcaagcagacctaccaggaaaaggtctgcggcctttgtgggaactttgacggcatacagaacaacgacctgacctccagcaacctgcaggtagaggaagacccagtagactttgggaacagctggaaggtctcctcccagtgtgctgacaccaggaaggtccctcttgactctagtccagctacctgtcacaacaacattatgaagcagaccatggtggacagcagctgccggattctcacttccgacgtgtttcaggactgcaacaagctggttgaccctgagccctacctggacgtgtgtatttacgacacatgctcctgcgagagcattggcgactgcgcttgcttttgcgacacaatagccgcctatgcccacgtgtgtgctcagcacggcaaagtggtgacttggaggacagctacactgtgtcctcagagttgtgaggagaggaacctgcgggaaaatggctatgagtgcgaatggcggtataatagctgcgccccagcttgtcaggtgacttgtcagcacccagaaccactggcttgtcctgtgcagtgtgttgaaggctgccatgctcattgcccaccaggcaaaattctggacgaactgctgcagacatgcgttgatcctgaggattgccctgtatgcgaagtggctggccggcggtttgcttctggcaaaaaagttactctgaatccctccgatcctgagcactgccagatatgccattgcgatgtggtgaatctgacttgcgaggcctgccaggaacctgggggcttggttgttcctcctacagatgcccctgttagtcctactactctgtatgtggaggatattagcgagccccctctgcatgattttggcggtggggggtcaggcggaggcggcagtggcggcgggggctctggcggaggtgggtccggcggtggcggttctggcgggggcggctctgacaaaactcacacatgcccaccgtgcccagcacctgaactccttgggggaccgtcagtcttcctcttccccccaaaacccaaggacaccctcatgatctcccggacccctgaggtcacatgcgtggtggtggacgtgagccacgaagaccctgaggtcaagttcaactggtacgtggacggcgtggaggtgcataatgccaagacaaagccgcgggaggagcagtacaacagcacgtaccgtgtggtcagcgtcctcaccgtcctgcaccaggactggctgaatggcaaggagtacaagtgcaaggtctccaacaaagccctcccagcccccatcgagaaaaccatctccaaagccaaagggcagccccgagaaccacaggtgtacaccctgcccccatcccgggatgagctgaccaagaaccaggtcagcctgacctgcctggtcaaaggcttctatcccagcgacatcgccgtggagtgggagagcaatgggcagccggagaacaactacaagaccacgcctcccgtgctggactccgacggctccttcttcctctacagcaagctcaccgtggacaagagcaggtggcagcaggggaacgtcttctcatgctccgtgatgcatgaggctctgcacaaccactacacgcagaagagcctctccctgtctccgggtaaaggcggtggggggtcaggcggaggcggcagtggcggcgggggctctggcggaggtgggtccggcggtggcggttctggcgggggcggctctgacaaaactcacacatgcccaccgtgcccagcacctgaactccttgggggaccgtcagtcttcctcttccccccaaaacccaaggacaccctcatgatctcccggacccctgaggtcacatgcgtggtggtggacgtgagccacgaagaccctgaggtcaagttcaactggtacgtggacggcgtggaggtgcataatgccaagacaaagccgcgggaggagcagtacaacagcacgtaccgtgtggtcagcgtcctcaccgtcctgcaccaggactggctgaatggcaaggagtacaagtgcaaggtctccaacaaagccctcccagcccccatcgagaaaaccatctccaaagccaaagggcagccccgagaaccacaggtgtacaccctgcccccatcccgggatgagctgaccaagaaccaggtcagcctgacctgcctggtcaaaggcttctatcccagcgacatcgccgtggagtgggagagcaatgggcagccggagaacaactacaagaccacgcctcccgtgctggactccgacggctccttcttcctctacagcaagctcaccgtggacaagagcaggtggcagcaggggaacgtcttctcatgctccgtgatgcatgaggctctgcacaaccactacacgcagaagagcctctccctgtctccgggtaaatgataa

SEQ ID NO: 71 - DNA, 5106 bp, Artificial Sequence
  dcFVIII/D'D3/Fc-HC/Fc-LC Heavy chain
gccaccagaagatactacctgggtgcagtggaactgtcatgggactatatgcaaagtgatctcggtgagctgcctgtggacgcaagatttcctcctagagtgccaaaatcttttccattcaacacctcagtcgtgtacaaaaagactctgtttgtagaattcacggatcaccttttcaacatcgctaagccaaggccaccctggatgggtctgctaggtcctaccatccaggctgaggtttatgatacagtggtcattacacttaagaacatggcttcccatcctgtcagtcttcatgctgttggtgtatcctactggaaagcttctgagggagctgaatatgatgatcagaccagtcaaagggagaaagaagatgataaagtcttccctggtggaagccatacatatgtctggcaggtcctgaaagagaatggtccaatggcctctgacccactgtgccttacctactcatatctttctcatgtggacctggtaaaagacttgaattcaggcctcattggagccctactagtatgtagagaagggagtctggccaaggaaaagacacagaccttgcacaaatttatactactttttgctgtatttgatgaagggaaaagttggcactcagaaacaaagaactccttgatgcaggatagggatgctgcatctgctcgggcctggcctaaaatgcacacagtcaatggttatgtaaacaggtctctgccaggtctgattggatgccacaggaaatcagtctattggcatgtgattggaatgggcaccactcctgaagtgcactcaatattcctcgaaggtcacacatttcttgtgaggaaccatcgccaggcgtccttggaaatctcgccaataactttccttactgctcaaacactcttgatggaccttggacagtttctactgttttgtcatatctcttcccaccaacatgatggcatggaagcttatgtcaaagtagacagctgtccagaggaaccccaactacgaatgaaaaataatgaagaagcggaagactatgatgatgatcttactgattctgaaatggatgtggtcaggtttgatgatgacaactctccttcctttatccaaattcgctcagttgccaagaagcatcctaaaacttgggtacattacattgctgctgaagaggaggactgggactatgctcccttagtcctcgcccccgatgacagaagttataaaagtcaatatttgaacaatggccctcagcggattggtaggaagtacaaaaaagtccgatttatggcatacacagatgaaacctttaagactcgtgaagctattcagcatgaatcaggaatcttgggacctttactttatggggaagttggagacacactgttgattatatttaagaatcaagcaagcagaccatataacatctaccctcacggaatcactgatgtccgtcctttgtattcaaggagattaccaaaaggtgtaaaacatttgaaggattttccaattctgccaggagaaatattcaaatataaatggacagtgactgtagaagatgggccaactaaatcagatcctcggtgcctgacccgctattactctagtttcgttaatatggagagagatctagcttcaggactcattggccctctcctcatctgctacaaagaatctgtagatcaaagaggaaaccagataatgtcagacaagaggaatgtcatcctgttttctgtatttgatgagaaccgaagctggtacctcacagagaatatacaacgctttctccccaatccagctggagtgcagcttgaggatccagagttccaagcctccaacatcatgcacagcatcaatggctatgtttttgatagtttgcagttgtcagtttgtttgcatgaggtggcatactggtacattctaagcattggagcacagactgacttcctttctgtcttcttctctggatataccttcaaacacaaaatggtctatgaagacacactcaccctattcccattctcaggagaaactgtcttcatgtcgatggaaaacccaggtctatggattctggggtgccacaactcagactttcggaacagaggcatgaccgccttactgaaggtttctagttgtgacaagaacactggtgattattacgaggacagttatgaagatatttcagcatacttgctgagtaaaaacaatgccattgaaccaagaagcttctcccagaattcaagacaccctagcactaggcaaaagcaatttaatgccaccacaattccagaaaatgacatagagaagactgacccttggtttgcacacagaacacctatgcctaaatgtcaaaatgtctcctctagtgatttgttgatgctcttgcgacagagtcctactccacatgggctatccttatctgatctccaagaagccaaatatgagactttttctgatgatccatcacctggagcaatagacagtaataacagcctgtctgaaatgacacacttcaggccacagctccatcacagtggggacatggtatttacccctgagtcaggcctccaattaagattaaatgagaaactggggacaactgcagcaacagagttgaagaaacttgatttcaaagtttctagtacatcaaataatctgatttcaacaattccatcagacaatttggcagcaggtactgataatacaagttccttaggacccccaagtatgccagttcattatgatagtcaattagataccactctatttggcaaaaagtcatctccccttactgagtctggtggacctctgagcctatcctgtcggccccccatggtcaagctggtgtgtcccgctgacaacctgcgggctgaagggctcgagtgtaccaaaacgtgccagaactatgacctggagtgcatgagcatgggctgtgtctctggctgcctctgccccccgggcatggtccggcatgagaacagatgtgtggccctggaaaggtgtccctgcttccatcagggcaaggagtatgcccctggagaaacagtgaagattggctgcaacacttgtgtctgtcgggaccggaagtggaactgcacagaccatgtgtgtgatgccacgtgctccacgatcggcatggcccactacctcaccttcgacgggctcaaatacctgttccccggggagtgccagtacgttctggtgcaggattactgcggcagtaaccctgggacctttcggatcctagtggggaataagggatgcagccacccctcagtgaaatgcaagaaacgggtcaccatcctggtggagggaggagagattgagctgtttgacggggaggtgaatgtgaagaggcccatgaaggatgagactcactttgaggtggtggagtctggccggtacatcattctgctgctgggcaaagccctctccgtggtctgggaccgccacctgagcatctccgtggtcctgaagcagacataccaggagaaagtgtgtggcctgtgtgggaattttgatggcatccagaacaatgacctcaccagcagcaacctccaagtggaggaagaccctgtggactttgggaactcctggaaagtgagctcgcagtgtgctgacaccagaaaagtgcctctggactcatcccctgccacctgccataacaacatcatgaagcagacgatggtggattcctcctgtagaatccttaccagtgacgtcttccaggactgcaacaagctggtggaccccgagccatatctggatgtctgcatttacgacacctgctcctgtgagtccattggggactgcgcctgcttctgcgacaccattgctgcctatgcccacgtgtgtgcccagcatggcaaggtggtgacctggaggacggccacattgtgcccccagagctgcgaggagaggaatctccgggagaacgggtatgagtgtgagtggcgctataacagctgtgcacctgcctgtcaagtcacgtgtcagcaccctgagccactggcctgccctgtgcagtgtgtggagggctgccatgcccactgccctccagggaaaatcctggatgagcttttgcagacctgcgttgaccctgaagactgtccagtgtgtgaggtggctggccggcgttttgcctcaggaaagaaagtcaccttgaatcccagtgaccctgagcactgccagatttgccactgtgatgttgtcaacctcacctgtgaagcctgccaggagccgggaggcctggtggtgcctcccacagatgccccggtgagccccaccactctgtatgtggaggacatctcggaaccgccgttgcacgatttcggcggtggggggtcaggcggaggcggcagtggcggcgggggctctggcggaggtgggtccggcggtggcggttctggcgggggcggctctgacaaaactcacacatgcccaccgtgcccagcacctgaactccttgggggaccgtcagtcttcctcttccccccaaaacccaaggacaccctcatgatctcccggacccctgaggtcacatgcgtggtggtggacgtgagccacgaagaccctgaggtcaagttcaactggtacgtggacggcgtggaggtgcataatgccaagacaaagccgcgggaggagcagtacaacagcacgtaccgtgtggtcagcgtcctcaccgtcctgcaccaggactggctgaatggcaaggagtacaagtgcaaggtctccaacaaagccctcccagcccccatcgagaaaaccatctccaaagccaaagggcagccccgagaaccacaggtgtacaccctgcccccatcccgggatgagctgaccaagaaccaggtcagcctgacctgcctggtcaaaggcttctatcccagcgacatcgccgtggagtgggagagcaatgggcagccggagaacaactacaagaccacgcctcccgtgctggactccgacggctccttcttcctctacagcaagctcaccgtggacaagagcaggtggcagcaggggaacgtcttctcatgctccgtgatgcatgaggctctgcacaaccactacacgcagaagagcctctccctgtctccgggtaaatgataa

SEQ ID NO: 72 - DNA, 3093 bp, Artificial Sequence
  dcFVIII/D'D3/Fc-HC/Fc-LC light chain
gccaccgatcctcttgcttgggataaccactatggtactcagataccaaaagaagagtggaaatcccaagagaagtcaccagaaaaaacagcttttaagaaaaaggataccattttgtccctgaacgcttgtgaaagcaatcatgcaatagcagcaataaatgagggacaaaataagcccgaaatagaagtcacctgggcaaagcaaggtaggactgaaaggctgtgctctcaaaacccaccagtcttgaaacgccatcaacgggaaataactcgtactactcttcagtcagatcaagaggaaattgactatgatgataccatatcagttgaaatgaagaaggaagattttgacatttatgatgaggatgaaaatcagagcccccgcagctttcaaaagaaaacacgacactattttattgctgcagtggagaggctctgggattatgggatgagtagctccccacatgttctaagaaacagggctcagagtggcagtgtccctcagttcaagaaagttgttttccaggaatttactgatggctcctttactcagcccttataccgtggagaactaaatgaacatttgggactcctggggccatatataagagcagaagttgaagataatatcatggtaactttcagaaatcaggcctctcgtccctattccttctattctagccttatttcttatgaggaagatcagaggcaaggagcagaacctagaaaaaactttgtcaagcctaatgaaaccaaaacttacttttggaaagtgcaacatcatatggcacccactaaagatgagtttgactgcaaagcctgggcttatttctctgatgttgacctggaaaaagatgtgcactcaggcctgattggaccccttctggtctgccacactaacacactgaaccctgctcatgggagacaagtgacagtacaggaatttgctctgtttttcaccatctttgatgagaccaaaagctggtacttcactgaaaatatggaaagaaactgcagggctccctgcaatatccagatggaagatcccacttttaaagagaattatcgcttccatgcaatcaatggctacataatggatacactacctggcttagtaatggctcaggatcaaaggattcgatggtatctgctcagcatgggcagcaatgaaaacatccattctattcatttcagtggacatgtgttcactgtacgaaaaaaagaggagtataaaatggcactgtacaatctctatccaggtgtttttgagacagtggaaatgttaccatccaaagctggaatttggcgggtggaatgccttattggcgagcatctacatgctgggatgagcacactttttctggtgtacagcaataagtgtcagactcccctgggaatggcttctggacacattagagattttcagattacagcttcaggacaatatggacagtgggccccaaagctggccagacttcattattccggatcaatcaatgcctggagcaccaaggagcccttttcttggatcaaggtggatctgttggcaccaatgattattcacggcatcaagacccagggtgcccgtcagaagttctccagcctctacatctctcagtttatcatcatgtatagtcttgatgggaagaagtggcagacttatcgaggaaattccactggaaccttaatggtcttctttggcaatgtggattcatctgggataaaacacaatatttttaaccctccaattattgctcgatacatccgtttgcacccaactcattatagcattcgcagcactcttcgcatggagttgatgggctgtgatttaaatagttgcagcatgccattgggaatggagagtaaagcaatatcagatgcacagattactgcttcatcctactttaccaatatgtttgccacctggtctccttcaaaagctcgacttcacctccaagggaggagtaatgcctggagacctcaggtgaataatccaaaagagtggctgcaagtggacttccagaagacaatgaaagtcacaggagtaactactcagggagtaaaatctctgcttaccagcatgtatgtgaaggagttcctcatctccagcagtcaagatggccatcagtggactctcttttttcagaatggcaaagtaaaggtttttcagggaaatcaagactccttcacacctgtggtgaactctctagacccaccgttactgactcgctaccttcgaattcacccccagagttgggtgcaccagattgccctgaggatggaggttctgggctgcgaggcacaggacctctacctggtcccacgtggaagtggcggtggggggtcaggcggaggcggcagtggcggcgggggctctggcggaggtggcagtggcgggggctctgacaaaactcacacatgcccaccgtgcccagcacctgaactccttgggggaccgtcagtcttcctcttccccccaaaacccaaggacaccctcatgatctcccggacccctgaggtcacatgcgtggtggtggacgtgagccacgaagaccctgaggtcaagttcaactggtacgtggacggcgtggaggtgcataatgccaagacaaagccgcgggaggagcagtacaacagcacgtaccgtgtggtcagcgtcctcaccgtcctgcaccaggactggctgaatggcaaggagtacaagtgcaaggtctccaacaaagccctcccagcccccatcgagaaaaccatctccaaagccaaagggcagccccgagaaccacaggtgtacaccctgcccccatcccgggatgagctgaccaagaaccaggtcagcctgacctgcctggtcaaaggcttctatcccagcgacatcgccgtggagtgggagagcaatgggcagccggagaacaactacaagaccacgcctcccgtgctggactccgacggctccttcttcctctacagcaagctcaccgtggacaagagcaggtggcagcaggggaacgtcttctcatgctccgtgatgcatgaggctctgcacaaccactacacgcagaagagcctctccctgtctccgggtaaatgataa

SEQ ID NO: 73 - DNA, 5106 bp, Artificial Sequence; identical to SEQ ID NO: 71
  dcFVIII/D'D3/Fc-HC, Fc Heavy chain

SEQ ID NO: 74 - DNA, 2322 bp, Artificial Sequence; identical to SEQ ID NO: 47
  dcFVIII/D'D3/Fc-HC, Fc Light chain

SEQ ID NO: 75 - DNA, 5877 bp, Artificial Sequence
  dcFVIII/D'D3/Fc/Fc-HC Heavy chain
gccaccagaagatactacctgggtgcagtggaactgtcatgggactatatgcaaagtgatctcggtgagctgcctgtggacgcaagatttcctcctagagtgccaaaatcttttccattcaacacctcagtcgtgtacaaaaagactctgtttgtagaattcacggatcaccttttcaacatcgctaagccaaggccaccctggatgggtctgctaggtcctaccatccaggctgaggtttatgatacagtggtcattacacttaagaacatggcttcccatcctgtcagtcttcatgctgttggtgtatcctactggaaagcttctgagggagctgaatatgatgatcagaccagtcaaagggagaaagaagatgataaagtcttccctggtggaagccatacatatgtctggcaggtcctgaaagagaatggtccaatggcctctgacccactgtgccttacctactcatatctttctcatgtggacctggtaaaagacttgaattcaggcctcattggagccctactagtatgtagagaagggagtctggccaaggaaaagacacagaccttgcacaaatttatactactttttgctgtatttgatgaagggaaaagttggcactcagaaacaaagaactccttgatgcaggatagggatgctgcatctgctcgggcctggcctaaaatgcacacagtcaatggttatgtaaacaggtctctgccaggtctgattggatgccacaggaaatcagtctattggcatgtgattggaatgggcaccactcctgaagtgcactcaatattcctcgaaggtcacacatttcttgtgaggaaccatcgccaggcgtccttggaaatctcgccaataactttccttactgctcaaacactcttgatggaccttggacagtttctactgttttgtcatatctcttcccaccaacatgatggcatggaagcttatgtcaaagtagacagctgtccagaggaaccccaactacgaatgaaaaataatgaagaagcggaagactatgatgatgatcttactgattctgaaatggatgtggtcaggtttgatgatgacaactctccttcctttatccaaattcgctcagttgccaagaagcatcctaaaacttgggtacattacattgctgctgaagaggaggactgggactatgctcccttagtcctcgcccccgatgacagaagttataaaagtcaatatttgaacaatggccctcagcggattggtaggaagtacaaaaaagtccgatttatggcatacacagatgaaacctttaagactcgtgaagctattcagcatgaatcaggaatcttgggacctttactttatggggaagttggagacacactgttgattatatttaagaatcaagcaagcagaccatataacatctaccctcacggaatcactgatgtccgtcctttgtattcaaggagattaccaaaaggtgtaaaacatttgaaggattttccaattctgccaggagaaatattcaaatataaatggacagtgactgtagaagatgggccaactaaatcagatcctcggtgcctgacccgctattactctagtttcgttaatatggagagagatctagcttcaggactcattggccctctcctcatctgctacaaagaatctgtagatcaaagaggaaaccagataatgtcagacaagaggaatgtcatcctgttttctgtatttgatgagaaccgaagctggtacctcacagagaatatacaacgctttctccccaatccagctggagtgcagcttgaggatccagagttccaagcctccaacatcatgcacagcatcaatggctatgtttttgatagtttgcagttgtcagtttgtttgcatgaggtggcatactggtacattctaagcattggagcacagactgacttcctttctgtcttcttctctggatataccttcaaacacaaaatggtctatgaagacacactcaccctattcccattctcaggagaaactgtcttcatgtcgatggaaaacccaggtctatggattctggggtgccacaactcagactttcggaacagaggcatgaccgccttactgaaggtttctagttgtgacaagaacactggtgattattacgaggacagttatgaagatatttcagcatacttgctgagtaaaaacaatgccattgaaccaagaagcttctcccagaattcaagacaccctagcactaggcaaaagcaatttaatgccaccacaattccagaaaatgacatagagaagactgacccttggtttgcacacagaacacctatgcctaaatgtcaaaatgtctcctctagtgatttgttgatgctcttgcgacagagtcctactccacatgggctatccttatctgatctccaagaagccaaatatgagactttttctgatgatccatcacctggagcaatagacagtaataacagcctgtctgaaatgacacacttcaggccacagctccatcacagtggggacatggtatttacccctgagtcaggcctccaattaagattaaatgagaaactggggacaactgcagcaacagagttgaagaaacttgatttcaaagtttctagtacatcaaataatctgatttcaacaattccatcagacaatttggcagcaggtactgataatacaagttccttaggacccccaagtatgccagttcattatgatagtcaattagataccactctatttggcaaaaagtcatctccccttactgagtctggtggacctctgagcctatcctgtcggccccccatggtcaagctggtgtgtcccgctgacaacctgcgggctgaagggctcgagtgtaccaaaacgtgccagaactatgacctggagtgcatgagcatgggctgtgtctctggctgcctctgccccccgggcatggtccggcatgagaacagatgtgtggccctggaaaggtgtccctgcttccatcagggcaaggagtatgcccctggagaaacagtgaagattggctgcaacacttgtgtctgtcgggaccggaagtggaactgcacagaccatgtgtgtgatgccacgtgctccacgatcggcatggcccactacctcaccttcgacgggctcaaatacctgttccccggggagtgccagtacgttctggtgcaggattactgcggcagtaaccctgggacctttcggatcctagtggggaataagggatgcagccacccctcagtgaaatgcaagaaacgggtcaccatcctggtggagggaggagagattgagctgtttgacggggaggtgaatgtgaagaggcccatgaaggatgagactcactttgaggtggtggagtctggccggtacatcattctgctgctgggcaaagccctctccgtggtctgggaccgccacctgagcatctccgtggtcctgaagcagacataccaggagaaagtgtgtggcctgtgtgggaattttgatggcatccagaacaatgacctcaccagcagcaacctccaagtggaggaagaccctgtggactttgggaactcctggaaagtgagctcgcagtgtgctgacaccagaaaagtgcctctggactcatcccctgccacctgccataacaacatcatgaagcagacgatggtggattcctcctgtagaatccttaccagtgacgtcttccaggactgcaacaagctggtggaccccgagccatatctggatgtctgcatttacgacacctgctcctgtgagtccattggggactgcgcctgcttctgcgacaccattgctgcctatgcccacgtgtgtgcccagcatggcaaggtggtgacctggaggacggccacattgtgcccccagagctgcgaggagaggaatctccgggagaacgggtatgagtgtgagtggcgctataacagctgtgcacctgcctgtcaagtcacgtgtcagcaccctgagccactggcctgccctgtgcagtgtgtggagggctgccatgcccactgccctccagggaaaatcctggatgagcttttgcagacctgcgttgaccctgaagactgtccagtgtgtgaggtggctggccggcgttttgcctcaggaaagaaagtcaccttgaatcccagtgaccctgagcactgccagatttgccactgtgatgttgtcaacctcacctgtgaagcctgccaggagccgggaggcctggtggtgcctcccacagatgccccggtgagccccaccactctgtatgtggaggacatctcggaaccgccgttgcacgatttcggcggtggggggtcaggcggaggcggcagtggcggcgggggctctggcggaggtgggtccggcggtggcggttctggcgggggcggctctgacaaaactcacacatgcccaccgtgcccagcacctgaactccttgggggaccgtcagtcttcctcttccccccaaaacccaaggacaccctcatgatctcccggacccctgaggtcacatgcgtggtggtggacgtgagccacgaagaccctgaggtcaagttcaactggtacgtggacggcgtggaggtgcataatgccaagacaaagccgcgggaggagcagtacaacagcacgtaccgtgtggtcagcgtcctcaccgtcctgcaccaggactggctgaatggcaaggagtacaagtgcaaggtctccaacaaagccctcccagcccccatcgagaaaaccatctccaaagccaaagggcagccccgagaaccacaggtgtacaccctgcccccatcccgggatgagctgaccaagaaccaggtcagcctgacctgcctggtcaaaggcttctatcccagcgacatcgccgtggagtgggagagcaatgggcagccggagaacaactacaagaccacgcctcccgtgctggactccgacggctccttcttcctctacagcaagctcaccgtggacaagagcaggtggcagcaggggaacgtcttctcatgctccgtgatgcatgaggctctgcacaaccactacacgcagaagagcctctccctgtctccgggtaaaggcggtggggggtcaggcggaggcggcagtggcggcgggggctctggcggaggtgggtccggcggtggcggttctggcgggggcggctctgacaaaactcacacatgcccaccgtgcccagcacctgaactccttgggggaccgtcagtcttcctcttccccccaaaacccaaggacaccctcatgatctcccggacccctgaggtcacatgcgtggtggtggacgtgagccacgaagaccctgaggtcaagttcaactggtacgtggacggcgtggaggtgcataatgccaagacaaagccgcgggaggagcagtacaacagcacgtaccgtgtggtcagcgtcctcaccgtcctgcaccaggactggctgaatggcaaggagtacaagtgcaaggtctccaacaaagccctcccagcccccatcgagaaaaccatctccaaagccaaagggcagccccgagaaccacaggtgtacaccctgcccccatcccgggatgagctgaccaagaaccaggtcagcctgacctgcctggtcaaaggcttctatcccagcgacatcgccgtggagtgggagagcaatgggcagccggagaacaactacaagaccacgcctcccgtgctggactccgacggctccttcttcctctacagcaagctcaccgtggacaagagcaggtggcagcaggggaacgtcttctcatgctccgtgatgcatgaggctctgcacaaccactacacgcagaagagcctctccctgtctccgggtaaatgataa

SEQ ID NO: 76 - DNA, 2322 bp, Artificial Sequence; identical to SEQ ID NO: 47
  dcFVIII/D'D3/Fc/Fc-HC Light chain

SEQ ID NO: 77 - DNA, 4335 bp, Artificial Sequence; identical to SEQ ID NO: 46
  dcFVIII/D'D3-HC/Fc-LC Heavy chain

SEQ ID NO: 78 - DNA, 3093 bp, Artificial Sequence; identical to SEQ ID NO: 72
  dcFVIII/D'D3-HC/Fc-LC Light chain

SEQ ID NO: 79 - DNA, 4335 bp, Artificial Sequence; identical to SEQ ID NO: 46
  dcFVIII/D'D3-HC/Fc/Fc-LC Heavy chain

SEQ ID NO: 80 - DNA, 3864 bp, Artificial Sequence
  dcFVIII/D'D3-HC/Fc/Fc-LC Light chain
gccaccgatcctcttgcttgggataaccactatggtactcagataccaaaagaagagtggaaatcccaagagaagtcaccagaaaaaacagcttttaagaaaaaggataccattttgtccctgaacgcttgtgaaagcaatcatgcaatagcagcaataaatgagggacaaaataagcccgaaatagaagtcacctgggcaaagcaaggtaggactgaaaggctgtgctctcaaaacccaccagtcttgaaacgccatcaacgggaaataactcgtactactcttcagtcagatcaagaggaaattgactatgatgataccatatcagttgaaatgaagaaggaagattttgacatttatgatgaggatgaaaatcagagcccccgcagctttcaaaagaaaacacgacactattttattgctgcagtggagaggctctgggattatgggatgagtagctccccacatgttctaagaaacagggctcagagtggcagtgtccctcagttcaagaaagttgttttccaggaatttactgatggctcctttactcagcccttataccgtggagaactaaatgaacatttgggactcctggggccatatataagagcagaagttgaagataatatcatggtaactttcagaaatcaggcctctcgtccctattccttctattctagccttatttcttatgaggaagatcagaggcaaggagcagaacctagaaaaaactttgtcaagcctaatgaaaccaaaacttacttttggaaagtgcaacatcatatggcacccactaaagatgagtttgactgcaaagcctgggcttatttctctgatgttgacctggaaaaagatgtgcactcaggcctgattggaccccttctggtctgccacactaacacactgaaccctgctcatgggagacaagtgacagtacaggaatttgctctgtttttcaccatctttgatgagaccaaaagctggtacttcactgaaaatatggaaagaaactgcagggctccctgcaatatccagatggaagatcccacttttaaagagaattatcgcttccatgcaatcaatggctacataatggatacactacctggcttagtaatggctcaggatcaaaggattcgatggtatctgctcagcatgggcagcaatgaaaacatccattctattcatttcagtggacatgtgttcactgtacgaaaaaaagaggagtataaaatggcactgtacaatctctatccaggtgtttttgagacagtggaaatgttaccatccaaagctggaatttggcgggtggaatgccttattggcgagcatctacatgctgggatgagcacactttttctggtgtacagcaataagtgtcagactcccctgggaatggcttctggacacattagagattttcagattacagcttcaggacaatatggacagtgggccccaaagctggccagacttcattattccggatcaatcaatgcctggagcaccaaggagcccttttcttggatcaaggtggatctgttggcaccaatgattattcacggcatcaagacccagggtgcccgtcagaagttctccagcctctacatctctcagtttatcatcatgtatagtcttgatgggaagaagtggcagacttatcgaggaaattccactggaaccttaatggtcttctttggcaatgtggattcatctgggataaaacacaatatttttaaccctccaattattgctcgatacatccgtttgcacccaactcattatagcattcgcagcactcttcgcatggagttgatgggctgtgatttaaatagttgcagcatgccattgggaatggagagtaaagcaatatcagatgcacagattactgcttcatcctactttaccaatatgtttgccacctggtctccttcaaaagctcgacttcacctccaagggaggagtaatgcctggagacctcaggtgaataatccaaaagagtggctgcaagtggacttccagaagacaatgaaagtcacaggagtaactactcagggagtaaaatctctgcttaccagcatgtatgtgaaggagttcctcatctccagcagtcaagatggccatcagtggactctcttttttcagaatggcaaagtaaaggtttttcagggaaatcaagactccttcacacctgtggtgaactctctagacccaccgttactgactcgctaccttcgaattcacccccagagttgggtgcaccagattgccctgaggatggaggttctgggctgcgaggcacaggacctctacctggtcccacgtggaagtggcggtggggggtcaggcggaggcggcagtggcggcgggggctctggcggaggtggcagtggcgggggctctgacaaaactcacacatgcccaccgtgcccagcacctgaactccttgggggaccgtcagtcttcctcttccccccaaaacccaaggacaccctcatgatctcccggacccctgaggtcacatgcgtggtggtggacgtgagccacgaagaccctgaggtcaagttcaactggtacgtggacggcgtggaggtgcataatgccaagacaaagccgcgggaggagcagtacaacagcacgtaccgtgtggtcagcgtcctcaccgtcctgcaccaggactggctgaatggcaaggagtacaagtgcaaggtctccaacaaagccctcccagcccccatcgagaaaaccatctccaaagccaaagggcagccccgagaaccacaggtgtacaccctgcccccatcccgggatgagctgaccaagaaccaggtcagcctgacctgcctggtcaaaggcttctatcccagcgacatcgccgtggagtgggagagcaatgggcagccggagaacaactacaagaccacgcctcccgtgctggactccgacggctccttcttcctctacagcaagctcaccgtggacaagagcaggtggcagcaggggaacgtcttctcatgctccgtgatgcatgaggctctgcacaaccactacacgcagaagagcctctccctgtctccgggtaaaggcggtggggggtcaggcggaggcggcagtggcggcgggggctctggcggaggtgggtccggcggtggcggttctggcgggggcggctctgacaaaactcacacatgcccaccgtgcccagcacctgaactccttgggggaccgtcagtcttcctcttccccccaaaacccaaggacaccctcatgatctcccggacccctgaggtcacatgcgtggtggtggacgtgagccacgaagaccctgaggtcaagttcaactggtacgtggacggcgtggaggtgcataatgccaagacaaagccgcgggaggagcagtacaacagcacgtaccgtgtggtcagcgtcctcaccgtcctgcaccaggactggctgaatggcaaggagtacaagtgcaaggtctccaacaaagccctcccagcccccatcgagaaaaccatctccaaagccaaagggcagccccgagaaccacaggtgtacaccctgcccccatcccgggatgagctgaccaagaaccaggtcagcctgacctgcctggtcaaaggcttctatcccagcgacatcgccgtggagtgggagagcaatgggcagccggagaacaactacaagaccacgcctcccgtgctggactccgacggctccttcttcctctacagcaagctcaccgtggacaagagcaggtggcagcaggggaacgtcttctcatgctccgtgatgcatgaggctctgcacaaccactacacgcagaagagcctctccctgtctccgggtaaatgataa
